United States Patent Application Publication US 2021/0254182 A1 - sequence listing, part 9

SEQ ID NO: 93 - DNA, 4785000 bp, Phytopthora sojae (residues 1-1,595,000 of 4,785,000)
  misc_feature (5100)..(12701): n is a, c, g, or t
  misc_feature (31089)..(31381): n is a, c, g, or t
  misc_feature (38034)..(39568): n is a, c, g, or t
  misc_feature (55412)..(59211): n is a, c, g, or t
  misc_feature (61801)..(66085): n is a, c, g, or t
  misc_feature (68521)..(96956): n is a, c, g, or t
  misc_feature (100033)..(100458): n is a, c, g, or t
  misc_feature (120210)..(120309): n is a, c, g, or t
  misc_feature (315352)..(315451): n is a, c, g, or t
  misc_feature (520040)..(525257): n is a, c, g, or t
  misc_feature (527430)..(527529): n is a, c, g, or t
  misc_feature (768241)..(768340): n is a, c, g, or t
  misc_feature (879466)..(879565): n is a, c, g, or t
  misc_feature (893446)..(893545): n is a, c, g, or t
  misc_feature (1044472)..(1044571): n is a, c, g, or t
  misc_feature (1229068)..(1229167): n is a, c, g, or t
  misc_feature (1574315)..(1593657): n is a, c, g, or t
  misc_feature (1598002)..(1614813): n is a, c, g, or t
  misc_feature (1618518)..(1618617): n is a, c, g, or t
  misc_feature (1632032)..(1632131): n is a, c, g, or t
  misc_feature (1637455)..(1646437): n is a, c, g, or t
  misc_feature (1650421)..(1651525): n is a, c, g, or t
  misc_feature (1655518)..(1665517): n is a, c, g, or t
  misc_feature (1682426)..(1682655): n is a, c, g, or t
  misc_feature (1689748)..(1695112): n is a, c, g, or t
  misc_feature (2039096)..(2039195): n is a, c, g, or t
  misc_feature (2060395)..(2069697): n is a, c, g, or t
  misc_feature (2079858)..(2079957): n is a, c, g, or t
  misc_feature (2331525)..(2331624): n is a, c, g, or t
  misc_feature (2343519)..(2349643): n is a, c, g, or t
  misc_feature (2354986)..(2361597): n is a, c, g, or t
  misc_feature (2612232)..(2612331): n is a, c, g, or t
  misc_feature (2621135)..(2621234): n is a, c, g, or t
  misc_feature (2634116)..(2634352): n is a, c, g, or t
  misc_feature (2688501)..(2700015): n is a, c, g, or t
  misc_feature (2702562)..(2703094): n is a, c, g, or t
  misc_feature (2706885)..(2707378): n is a, c, g, or t
  misc_feature (3102932)..(3103031): n is a, c, g, or t
  misc_feature (3288177)..(3288276): n is a, c, g, or t
  misc_feature (3334997)..(3335096): n is a, c, g, or t
  misc_feature (3372136)..(3374716): n is a, c, g, or t
  misc_feature (3380009)..(3398767): n is a, c, g, or t
  misc_feature (3402553)..(3407783): n is a, c, g, or t
  misc_feature (3414864)..(3415590): n is a, c, g, or t
  misc_feature (3586226)..(3586325): n is a, c, g, or t
  misc_feature (3768894)..(3768993): n is a, c, g, or t
  misc_feature (3855179)..(3857074): n is a, c, g, or t
  misc_feature (3859551)..(3859926): n is a, c, g, or t
  misc_feature (4325012)..(4325111): n is a, c, g, or t
  misc_feature (4337405)..(4340559): n is a, c, g, or t
  misc_feature (4343234)..(4347453): n is a, c, g, or t
  misc_feature (4351673)..(4351789): n is a, c, g, or t
  misc_feature (4358531)..(4360823): n is a, c, g, or t
  misc_feature (4367602)..(4413309): n is a, c, g, or t
  misc_feature (4416324)..(4440057): n is a, c, g, or t
  misc_feature (4445940)..(4446039): n is a, c, g, or t
  misc_feature (4452185)..(4452457): n is a, c, g, or t
  misc_feature (4455887)..(4456136): n is a, c, g, or t
  misc_feature (4464596)..(4466633): n is a, c, g, or t
  misc_feature (4470768)..(4470867): n is a, c, g, or t
  misc_feature (4477508)..(4535822): n is a, c, g, or t
  misc_feature (4538201)..(4541672): n is a, c, g, or t
  misc_feature (4546379)..(4555874): n is a, c, g, or t
  misc_feature (4560307)..(4561100): n is a, c, g, or t
  misc_feature (4663568)..(4663667): n is a, c, g, or t
  misc_feature (4689833)..(4690205): n is a, c, g, or t
  misc_feature (4694054)..(4704053): n is a, c, g, or t
  misc_feature (4708607)..(4708807): n is a, c, g, or t
  misc_feature (4717807)..(4720493): n is a, c, g, or t
  misc_feature (4723566)..(4723713): n is a, c, g, or t
tgggctcataacctgatggaaggtatggatcttggacacgaagctcggacgaagcggagggagggacgtcgcagacggcgggaccggagcgaaggcacttgaggggtagaatgaagattcgaaagtgattgaattgttggagcttacaccctactgttatagacacgcgaccctgcgtccttccacctagtgcatctaatcaaccatgttcatccaatcatcctactcgtctaatcatcggtggcgtaaacaacttaccgtaatcaccataatcaacgtgggttcggattggaccggttcgggttaaccggttaaagggtacaactggtacacagtacccaagaccagcaaccctcaatacgccccctcaatgcgaagtcccacgaatgccgagagccaccgtcagatccgtgtggtgtggtcccgcaagcgccttcgtcatgatgtccgctagcatcacagaagtctcgcagtactggagcttgacttcgccgcgcttgacttcatcgcggatgtggtggtacttgatgtcgatgtgcttggcgcgaccgtggttcactgggttcttcgtcatcttgatgcacgactggttgtcttcgcggatcatgagttcgggtccagtctcattagcggccgccagaatctcgcatagcaggcgatgaatccacttgccttcttggatagccagactgagcgcgatgtactccgcttcattgcttcttgcttccccagctcacaggcgcactcatgagcatgaacgtgtagcctgaagtggacttgcggtcggcgaggtcgccggcccagtccgcgtccgagtagccacgaacgtcgatcttgtcgcccggcttgaagcagatcccatgcgtcttggtgccttgcaggtagcgaaagatacgcttgaccgcaacccagtgttcctcttgggggttctccatgaagcgcgatacatagccaacggcgtacgcgatgtctgggcgcgtggcggtcattaggtgcatcagagcaccaacagcttcgcgaaacggagcgttcaccttggtcgccgcgtcgcttggaaccagtcgagtgctcatgtccaccggactcaccacggccttgcactcgtccatggcgaagcgcttcaggatgtcgtccacgtatcgccgctggcacatggtcacgctgccgtccgggccgtccaccaactcgatcccaagaacaaacgcgcacttgccgctgtcggtcatctcgaagcgcgtcttcaggtcggtcttcgtgcgtgcgatcagctcgggcgaactcccggtaatcagtacgtcatccacgtacaccagtacaagcacgcagtgaccgtccaccaccttgatgtagaggcacggatcgaaggccgacacttggaagccgatggagcacacgaattcgtcgaaggtctcgttccacactcgcggagcttgcttgagaccgtagatggccttcaccagttccaggcagtcgaagtcaccatccagttcgacgccttccggaaccacgcagaagatcacctccttcattatcccgtacaggaatgctgtcaccacgtcgagttggtcgaggggccagccaaaatacttagcgatcgcgatcaccatgcgcagcgtcacatacttgaccacgggcgagaacgtctcggtgtagtcaatgccgtacttctgcttgaagcccttggccacgaggcgcgccttgtacttctcgatcgagccgtccgctttgcgcttgatcttgaacacccacttggtatcgatggcgcgttgtccgttaggcaacttggcagctcgaaacacaccacgcagtcgcatcgacttgagctccgcgcggatcgctttgcgccagtgcacttgatcaggaccgttcacagcctcttggaacgtcgtcggctccgatagatcggctgctgcttccacagcgttggcactggcacgccaaaacactggaggcgtcgagtcgtcgtcttcatcttggtccccagacttttcttcttcgtcggggtcggctcggcgcgaggaggatacgtccggcgcacttgcttcttctaagccagctcggtggcgaacggggcgcgatcttctggcagtgttgtcgtcgccactcggtcggtacttgcgcttccccgcctgcttgaagctcgtttggcgcggtccatcgttgtcgtccaggtccagcgcgtccaagtccaacacagcatcatcgacgtcttcatccgaagtatgcgtcgaaagtccaaaggtcgactcatcgaagttgacatcgcgactgataaccacctgccccgcctcgatgtcataaactcgatacgccttggacacttcttcgtagccgaggaacagcccggcgcgagccttggggtcccacttgcgccgtctttccttcggcgtcaggatgtacgtctggcatccgaacacacgcatgtgcttcacactcggcttggacttgtaaacgatctcgaacggagtcttgtgttcgatcttgggtgatggcagacgattcttcacgtagatggctgtcatggccgcctcagcccagaagctcttgtccagcttggcgtgatgcagcatgctgcggccaatcgtgacgatggtccggatggcgcgttctgccgtgccgttggtctggtgcgcgtacggaaccgtggtttgctgctcgatgccttcgacttcgtagaaggccttgagcgagttggtcgcgaactcacgggctccgtcgtgccgcacaaacttgaccttcttgccgaactgcgtctgcaccttcgtgacgtacatcttgatgtaatcctcgctctccgacttggcacgcaggcagaaccccttcatgcatccgctggcttcgtccacgatcagcagcagatacttgctgccacccagtgactcttcttccatggggccgcacacgtcgaagtggagcagctcgaacgtgtcgtagtgacgcttgtcacggttgcttgggaacggcttctggaccattttcccttgctggcagccgcgacacacgtttggtccactcgacttggaaggtgccttcgcgtccttgatcatgttgttgtcgaccatcttgcgaagcacctccaccggagcgtgacccatacgcgcgtgtaagtcgaccgtcttcccactggtcgccgcattcgccgatcgctgaggcgtctggagccagtagagtccatccacgaggtttgccgtcgccaccactagcttggagcccttgtgcgcaatctgcatcttggtgctgtcgaacacgacttggaacagaccactcttgttgatctgtggcaccgaaagcagattcttgctcatgcttgggacgtacagcgcgttcttgatctcgatgtcgcgctcgtcgccgttgggcagaaccactcgttccacgatggtccccacacccatgatggccgccttgttgccgtcggccaccgaaagttcgccttcattccgctcaatcaaatgagcgaacttggccttgtcgttgcagatgtggtgcgttgcgccgctgtcgaccgcccacaacccggacacattcttgcccgtcgaaatgccacactccagtgagaccgcgaacgccactcgatcatagccgtagtcgtagttgtgctggcgtcgtcgttcctccactgggcattgttggccccgcgtccacggccattgccattgccgccgcgtcttgggccccgattctcgtccttctgcttggtccagcacttgtcaatcgtgtgccccaatttcccgcagtacgtacactggcgagactctcggtcggtgttgaacgccttggccgcattctccgtcttcaccgtcgccgtcttctcgccttgtctcttgatgtgctcattcgtcagcaccttcacgacgtcttgcgatcgtagttcagcgctgctcatctccaagttcagcacgacgttctcgtagctcttggggaggctgcgcaacaggcagatcgccacgtcctcatcctccatcttggcgccgatgctgctgagcttggcgctgatgttgaggacctcgttgcaatgatgcaagacgttgccgccttccgacatctccatgctgaagagttggcgcttcaggtagatgcgtccagccttctgcgaaccaccgtacagcgtcttcaggcgcgtccacgcaacccacgcttcctcgcagtcgtcgaccacatggtggtagtccgcgtccatgtggagcaacatcagtccgaacgcgatgttgctcgacttgacgtagtcgtccttggcccgcgagtccgtgaagctcggcgtcgtctcgcggttcacgacatgccacgtcgacttggtcaggaacacgccacgcatgtagcggttccacgtcgcgtagttgtccccgttgaacttgtcaatggagaccttggtcgaggcgtcttgggcagaggacatggtgcttgggctcataacctgatggaaggtatggatcttggacacgaagctcggacgaagcggagggagggacgtcgcagacggcgggaccggagcgaaggcacttgaggggtagaatgaagattcgaaagtgattgaattgttggagcttacaccctactgttatagacacgcgaccctgcgtcctatcacctagtgcatctaatcaaccatcactcaccggtgttcatccaatcatcctactcgtctaatcatcggtggcgtaaacaacttaccgtaatcaccataatcaacgtgggttcggattggaccggttcgggctaaccggtcaatgggtacaactggtacacagtacccaagaccagcaaccctcaatagttgaggacctcgttgcaatgatgcaagacgttgccgccttccgacatctccatgctgaagagttggcgcttcaggtagatgcgtccagccttctgcgaaccaccgtacagcgtcttcaggcgcgtccacgcaacccacgcttcctcgcagtcgtcgaccacatggtggtagtccgcgtccatgtggagcaacatcagtccgaacgcgatgttgctcgacttgacgtagtcgtccttggcccgcgagtccgtgaagctcggcgtcgtctcgcggttcacgacatgccacgtcgacttggtcaggaacacgccacgcatgtagcggtnnnnnnnnnnnnnnnnnnnnnnnnnnnnnnnnnnnnnnnnnnnnnnnnnnnnnnnnnnnnnnnnnnnnnnnnnnnnnnnnnnnnnnnnnnnnnnnnnnnnnnnnnnnnnnnnnnnnnnnnnnnnnnnnnnnnnnnnnnnnnnnnnnnnnnnnnnnnnnnnnnnnnnnnnnnnnnnnnnnnnnnnnnnnnnnnnnnnnnnnnnnnnnnnnnnnnnnnnnnnnnnnnnnnnnnnnnnnnnnnnnnnnnnnnnnnnnnnnnnnnnnnnnnnnnnnnnnnnnnnnnnnnnnnnnnnnnnnnnnnnnnnnnnnnnnnnnnnnnnnnnnnnnnnnnnnnnnnnnnnnnnnnnnnnnnnnnnnnnnnnnnnnnnnnnnnnnnnnnnnnnnnnnnnnnnnnnnnnnnnnnnnnnnnnnnnnnnnnnnnnnnnnnnnnnnnnnnnnnnnnnnnnnnnnnnnnnnnnnnnnnnnnnnnnnnnnnnnnnnnnnnnnnnnnnnnnnnnnnnnnnnnnnnnnnnnnnnnnnnnnnnnnnnnnnnnnnnnnnnnnnnnnnnnnnnnnnnnnnnnnnnnnnnnnnnnnnnnnnnnnnnnnnnnnnnnnnnnnnnnnnnnnnnnnnnnnnnnnnnnnnnnnnnnnnnnnnnnnnnnnnnnnnnnnnnnnnnnnnnnnnnnnnnnnnnnnnnnnnnnnnnnnnnnnnnnnnnnnnnnnnnnnnnnnnnnnnnnnnnnnnnnnnnnnnnnnnnnnnnnnnnnnnnnnnnnnnnnnnnnnnnnnnnnnnnnnnnnnnnnnnnnnnnnnnnnnnnnnnnnnnnnnnnnnnnnnnnnnnnnnnnnnnnnnnnnnnnnnnnnnnnnnnnnnnnnnnnnnnnnnnnnnnnnnnnnnnnnnnnnnnnnnnnnnnnnnnnnnnnnnnnnnnnnnnnnnnnnnnnnnnnnnnnnnnnnnnnnnnnnnnnnnnnnnnnnnnnnnnnnnnnnnnnnnnnnnnnnnnnnnnnnnnnnnnnnnnnnnnnnnnnnnnnnnnnnnnnnnnnnnnnnnnnnnnnnnnnnnnnnnnnnnnnnnnnnnnnnnnnnnnnnnnnnnnnnnnnnnnnnnnnnnnnnnnnnnnnnnnnnnnnnnnnnnnnnnnnnnnnnnnnnnnnnnnnnnnnnnnnnnnnnnnnnnnnnnnnnnnnnnnnnnnnnnnnnnnnnnnnnnnnnnnnnnnnnnnnnnnnnnnnnnnnnnnnnnnnnnnnnnnnnnnnnnnnnnnnnnnnnnnnnnnnnnnnnnnnnnnnnnnnnnnnnnnnnnnnnnnnnnnnnnnnnnnnnnnnnnnnnnnnnnnnnnnnnnnnnnnnnnnnnnnnnnnnnnnnnnnnnnnnnnnnnnnnnnnnnnnnnnnnnnnnnnnnnnnnnnnnnnnnnnnnnnnnnnnnnnnnnnnnnnnnnnnnnnnnnnnnnnnnnnnnnnnnnnnnnnnnnnnnnnnnnnnnnnnnnnnnnnnnnnnnnnnnnnnnnnnnnnnnnnnnnnnnnnnnnnnnnnnnnnnnnnnnnnnnnnnnnnnnnnnnnnnnnnnnnnnnnnnnnnnnnnnnnnnnnnnnnnnnnnnnnnnnnnnnnnnnnnnnnnnnnnnnnnnnnnnnnnnnnnnnnnnnnnnnnnnnnnnnnnnnnnnnnnnnnnnnnnnnnnnnnnnnnnnnnnnnnnnnnnnnnnnnnnnnnnnnnnnnnnnnnnnnnnnnnnnnnnnnnnnnnnnnnnnnnnnnnnnnnnnnnnnnnnnnnnnnnnnnnnnnnnnnnnnnnnnnnnnnnnnnnnnnnnnnnnnnnnnnnnnnnnnnnnnnnnnnnnnnnnnnnnnnnnnnnnnnnnnnnnnnnnnnnnnnnnnnnnnnnnnnnnnnnnnnnnnnnnnnnnnnnnnnnnnnnnnnnnnnnnnnnnnnnnnnnnnnnnnnnnnnnnnnnnnnnnnnnnnnnnnnnnnnnnnnnnnnnnnnnnnnnnnnnnnnnnnnnnnnnnnnnnnnnnnnnnnnnnnnnnnnnnnnnnnnnnnnnnnnnnnnnnnnnnnnnnnnnnnnnnnnnnnnnnnnnnnnnnnnnnnnnnnnnnnnnnnnnnnnnnnnnnnnnnnnnnnnnnnnnnnnnnnnnnnnnnnnnnnnnnnnnnnnnnnnnnnnnnnnnnnnnnnnnnnnnnnnnnnnnnnnnnnnnnnnnnnnnnnnnnnnnnnnnnnnnnnnnnnnnnnnnnnnnnnnnnnnnnnnnnnnnnnnnnnnnnnnnnnnnnnnnnnnnnnnnnnnnnnnnnnnnnnnnnnnnnnnnnnnnnnnnnnnnnnnnnnnnnnnnnnnnnnnnnnnnnnnnnnnnnnnnnnnnnnnnnnnnnnnnnnnnnnnnnnnnnnnnnnnnnnnnnnnnnnnnnnnnnnnnnnnnnnnnnnnnnnnnnnnnnnnnnnnnnnnnnnnnnnnnnnnnnnnnnnnnnnnnnnnnnnnnnnnnnnnnnnnnnnnnnnnnnnnnnnnnnnnnnnnnnnnnnnnnnnnnnnnnnnnnnnnnnnnnnnnnnnnnnnnnnnnnnnnnnnnnnnnnnnnnnnnnnnnnnnnnnnnnnnnnnnnnnnnnnnnnnnnnnnnnnnnnnnnnnnnnnnnnnnnnnnnnnnnnnnnnnnnnnnnnnnnnnnnnnnnnnnnnnnnnnnnnnnnnnnnnnnnnnnnnnnnnnnnnnnnnnnnnnnnnnnnnnnnnnnnnnnnnnnnnnnnnnnnnnnnnnnnnnnnnnnnnnnnnnnnnnnnnnnnnnnnnnnnnnnnnnnnnnnnnnnnnnnnnnnnnnnnnnnnnnnnnnnnnnnnnnnnnnnnnnnnnnnnnnnnnnnnnnnnnnnnnnnnnnnnnnnnnnnnnnnnnnnnnnnnnnnnnnnnnnnnnnnnnnnnnnnnnnnnnnnnnnnnnnnnnnnnnnnnnnnnnnnnnnnnnnnnnnnnnnnnnnnnnnnnnnnnnnnnnnnnnnnnnnnnnnnnnnnnnnnnnnnnnnnnnnnnnnnnnnnnnnnnnnnnnnnnnnnnnnnnnnnnnnnnnnnnnnnnnnnnnnnnnnnnnnnnnnnnnnnnnnnnnnnnnnnnnnnnnnnnnnnnnnnnnnnnnnnnnnnnnnnnnnnnnnnnnnnnnnnnnnnnnnnnnnnnnnnnnnnnnnnnnnnnnnnnnnnnnnnnnnnnnnnnnnnnnnnnnnnnnnnnnnnnnnnnnnnnnnnnnnnnnnnnnnnnnnnnnnnnnnnnnnnnnnnnnnnnnnnnnnnnnnnnnnnnnnnnnnnnnnnnnnnnnnnnnnnnnnnnnnnnnnnnnnnnnnnnnnnnnnnnnnnnnnnnnnnnnnnnnnnnnnnnnnnnnnnnnnnnnnnnnnnnnnnnnnnnnnnnnnnnnnnnnnnnnnnnnnnnnnnnnnnnnnnnnnnnnnnnnnnnnnnnnnnnnnnnnnnnnnnnnnnnnnnnnnnnnnnnnnnnnnnnnnnnnnnnnnnnnnnnnnnnnnnnnnnnnnnnnnnnnnnnnnnnnnnnnnnnnnnnnnnnnnnnnnnnnnnnnnnnnnnnnnnnnnnnnnnnnnnnnnnnnnnnnnnnnnnnnnnnnnnnnnnnnnnnnnnnnnnnnnnnnnnnnnnnnnnnnnnnnnnnnnnnnnnnnnnnnnnnnnnnnnnnnnnnnnnnnnnnnnnnnnnnnnnnnnnnnnnnnnnnnnnnnnnnnnnnnnnnnnnnnnnnnnnnnnnnnnnnnnnnnnnnnnnnnnnnnnnnnnnnnnnnnnnnnnnnnnnnnnnnnnnnnnnnnnnnnnnnnnnnnnnnnnnnnnnnnnnnnnnnnnnnnnnnnnnnnnnnnnnnnnnnnnnnnnnnnnnnnnnnnnnnnnnnnnnnnnnnnnnnnnnnnnnnnnnnnnnnnnnnnnnnnnnnnnnnnnnnnnnnnnnnnnnnnnnnnnnnnnnnnnnnnnnnnnnnnnnnnnnnnnnnnnnnnnnnnnnnnnnnnnnnnnnnnnnnnnnnnnnnnnnnnnnnnnnnnnnnnnnnnnnnnnnnnnnnnnnnnnnnnnnnnnnnnnnnnnnnnnnnnnnnnnnnnnnnnnnnnnnnnnnnnnnnnnnnnnnnnnnnnnnnnnnnnnnnnnnnnnnnnnnnnnnnnnnnnnnnnnnnnnnnnnnnnnnnnnnnnnnnnnnnnnnnnnnnnnnnnnnnnnnnnnnnnnnnnnnnnnnnnnnnnnnnnnnnnnnnnnnnnnnnnnnnnnnnnnnnnnnnnnnnnnnnnnnnnnnnnnnnnnnnnnnnnnnnnnnnnnnnnnnnnnnnnnnnnnnnnnnnnnnnnnnnnnnnnnnnnnnnnnnnnnnnnnnnnnnnnnnnnnnnnnnnnnnnnnnnnnnnnnnnnnnnnnnnnnnnnnnnnnnnnnnnnnnnnnnnnnnnnnnnnnnnnnnnnnnnnnnnnnnnnnnnnnnnnnnnnnnnnnnnnnnnnnnnnnnnnnnnnnnnnnnnnnnnnnnnnnnnnnnnnnnnnnnnnnnnnnnnnnnnnnnnnnnnnnnnnnnnnnnnnnnnnnnnnnnnnnnnnnnnnnnnnnnnnnnnnnnnnnnnnnnnnnnnnnnnnnnnnnnnnnnnnnnnnnnnnnnnnnnnnnnnnnnnnnnnnnnnnnnnnnnnnnnnnnnnnnnnnnnnnnnnnnnnnnnnnnnnnnnnnnnnnnnnnnnnnnnnnnnnnnnnnnnnnnnnnnnnnnnnnnnnnnnnnnnnnnnnnnnnnnnnnnnnnnnnnnnnnnnnnnnnnnnnnnnnnnnnnnnnnnnnnnnnnnnnnnnnnnnnnnnnnnnnnnnnnnnnnnnnnnnnnnnnnnnnnnnnnnnnnnnnnnnnnnnnnnnnnnnnnnnnnnnnnnnnnnnnnnnnnnnnnnnnnnnnnnnnnnnnnnnnnnnnnnnnnnnnnnnnnnnnnnnnnnnnnnnnnnnnnnnnnnnnnnnnnnnnnnnnnnnnnnnnnnnnnnnnnnnnnnnnnnnnnnnnnnnnnnnnnnnnnnnnnnnnnnnnnnnnnnnnnnnnnnnnnnnnnnnnnnnnnnnnnnnnnnnnnnnnnnnnnnnnnnnnnnnnnnnnnnnnnnnnnnnnnnnnnnnnnnnnnnnnnnnnnnnnnnnnnnnnnnnnnnnnnnnnnnnnnnnnnnnnnnnnnnnnnnnnnnnnnnnnnnnnnnnnnnnnnnnnnnnnnnnnnnnnnnnnnnnnnnnnnnnnnnnnnnnnnnnnnnnnnnnnnnnnnnnnnnnnnnnnnnnnnnnnnnnnnnnnnnnnnnnnnnnnnnnnnnnnnnnnnnnnnnnnnnnnnnnnnnnnnnnnnnnnnnnnnnnnnnnnnnnnnnnnnnnnnnnnnnnnnnnnnnnnnnnnnnnnnnnnnnnnnnnnnnnnnnnnnnnnnnnnnnnnnnnnnnnnnnnnnnnnnnnnnnnnnnnnnnnnnnnnnnnnnnnnnnnnnnnnnnnnnnnnnnnnnnnnnnnnnnnnnnnnnnnnnnnnnnnnnnnnnnnnnnnnnnnnnnnnnnnnnnnnnnnnnnnnnnnnnnnnnnnnnnnnnnnnnnnnnnnnnnnnnnnnnnnnnnnnnnnnnnnnnnnnnnnnnnnnnnnnnnnnnnnnnnnnnnnnnnnnnnnnnnnnnnnnnnnnnnnnnnnnnnnnnnnnnnnnnnnnnnnnnnnnnnnnnnnnnnnnnnnnnnnnnnnnnnnnnnnnnnnnnnnnnnnnnnnnnnnnnnnnnnnnnnnnnnnnnnnnnnnnnnnnnnnnnnnnnnnnnnnnnnnnnnnnnnnnnnnnnnnnnnnnnnnnnnnnnnnnnnnnnnnnnnnnnnnnnnnnnnnnnnnnnnnnnnnnnnnnnnnnnnnnnnnnnnnnnnnnnnnnnnnnnnnnnnnnnnnnnnnnnnnnnnnnnnnnnnnnnnnnnnnnnnnnnnnnnnnnnnnnnnnnnnnnnnnnnnnnnnnnnnnnnnnnnnnnnnnnnnnnnnnnnnnnnnnnnnnnnnnnnnnnnnnnnnnnnnnnnnnnnnnnnnnnnnnnnnnnnnnnnnnnnnnnnnnnnnnnnnnnnnnnnnnnnnnnnnnnnnnnnnnnnnnnnnnnnnnnnnnnnnnnnnnnnnnnnnnnnnnnnnnnnnnnnnnnnnnnnnnnnnnnnnnnnnnnnnnnnnnnnnnnnnnnnnnnnnnnnnnnnnnnnnnnnnnnnnnnnnnnnnnnnnnnnnnnnnnnnnnnnnnnnnnnnnnnnnnnnnnnnnnnnnnnnnnnnnnnnnnnnnnnnnnnnnnnnnnnnnnnnnnnnnnnnnnnnnnnnnnnnnnnnnnnnnnnnnnnnnnnnnnnnnnnnnnnnnnnnnnnnnnnnnnnnnnnnnnnnnnnnnnnnnnnnnnnnnnnnnnnnnnnnnnnnnnnnnnnnnnnnnnnnnnnnnnnnnnnnnnnnnnnnnnnnnnnnnnnnnnnnnnnnnnnnnnnnnnnnnnnnnnnnnnnnnnnnnnnnnnnnnnnnnnnnnnnnnnnnnnnnnnnnnnnnnnnnnnnnnnnnnnnnnnnnnnnnnnnnnnnnnnnnnnnnnnnnnnnnnnnnnnnnnnnnnnnnnnnnnnnnnnnnnnnnnnnnnnnnnnnnnnnnnnnnnnnnnnnnnnnnnnnnnnnnnnnnnnnnnnnnnnnnnnnnnnnnnnnnnnnnnnnnnnnnnnnnnnnnnnnnnnnnnnnnnnnnnnnnnnnnnnnnnnnnnnnnnnnnnnnnnnnnnnnnnnnnnnnnnnnnnnnnnnnnnnnnnnnnnnnnnnnnnnnnnnnnnnnnnnnnnnnnnnnnnnnnnnnnnnnnnnnnnnnnnnnnnnnnnnnnnnnnnnnnnnnnnnnnnnnnnnnnnnnnnnnnnnnnnnnnnnnnnnnnnnnnnnnnnnnnnnnnnnnnnnnnnnnnnnnnnnnnnnnnnnnnnnnnnnnnnnnnnnnnnnnnnnnnnnnnnnnnnnnnnnnnnnnnnnnnnnnnnnnnnnnnnnnnnnnnnnnnnnnnnnnnnnnnnnnnnnnnnnnnnnnnnnnnnnnnnnnnnnnnnnnnnnnnnnnnnnnnnnnnnnnnnnnnnnnnnnnnnnnnnnnnnnnnnnnnnnnnnnnnnnnnnnnnnnnnnnnnnnnnnnnnnnnnnnnnnnnnnnnnnnnnnnnnnnnnnnnnnnnnnnnnnnnnnnnnnnnnnnnnnnnnnnnnnnnnnnnnnnnnnnnnnnnnnnnnnnnnnnnnnnnnnnnnnnnnnnnnnnnnnnnnnnnnnnnnnnnnnnnnnnnnnnnnnnnnnnnnnnnnnnnnnnnnnnnnnnnnnnnnnnnnnnnnnnnnnnnnnnnnnnnnnnnnnnnnnnnnnnnnnnnnnnnnnnnnnnnnnnnnnnnnnnnnnnnnnnnnnnnnnnnnnnnnnnnnnnnnnnnnnnnnnnnnnnnnnnnnnnnnnnnnnnnnnnnnnnnnnnnnnnnnnnnnnnnnnnnnnnnnnnnnnnnnnnnnnnnnnnnnnnnnnnnnnnnnnnnnnnnnnnnnnnnnnnnnnnnnnnnnnnnnnnnnnnnnnnnnnnnnnnnnnnnnnnnnnnnnnnnnnnnnnnnnnnnnnnnnnnnnnnnnnnnnnnnnnnnnnnnnnnnnnnnnnnnnnnnnnnnnnnnnnnnnnnnnnnnnnnnnnnnnnnnnnnnnnnnnnnnnnnnnnnnnnnnnnnnnnnnnnnnnnnnnnnnnnnnnnnnnnnnnnnnnnnnnnnnnnnacgaagtcgaaggcatcgagcagcaaaccacggttccgtacgcgcaccagaccaacggcacggcagaacgcgccatccggatcatcgtcacgattggccgcagcatgctgcatcacgccaagctggacaagagcttctgggctgaggcggccatgacagccatctacgtgaagaatcgtctgccatcacccaagatcgaacacaagactccgttcgagatcgtttacaagtccaagccgagtgtgaagcacatgcgtgtgttcggatgccagacgtacatcctgacgccgaaggaaagacggcgcaagtgggaccccaaggctcgcgccgggctgttcctcggctacgaagaagtgtccaaggcgtatcgagtttatgacatcgaggcggggcaggtggttatcagtcgcgatgtctacttcgatgagtcgacctttggactttcgacgcatacttcggatgaagacttcgatgatgctgtgctggacttggacgcgctggacctggacgacaacgatggaccgcgccaaacgagcttcaagcaggcggggaagcgcaagtaccgaccgagtggcgacgacaacactgccagaagatcgcgccccgttcgccaccgagctggcttagaagaagcaagtgcgccggacgtatcctcctcgcgccgagccgaccccgacgaagaagaaaagtctggggaccaagatgaagacgacgactcgaccctccagtgttttggcgtgccagtgccaacgctgtggaagcagcagccgatctatcggagccgacgacgttccaagaggctgtgaacggtcctgatcaagtgcactggcgcaaagcgatccgcgcggagctcaagtcgatgcgactgcgtggtgtgtttcgagctgccaagttgcctaacggacaacgcgccatcgataccaagtgggtgttcaagatcaagcgcaaagcggacggctcgatcgagaagtacaaggcgcgcctcgtggccaagggcttcaagcagaagtacggcattgactacaccgagacgttctcgcccgtggtcaagtatgtgacgctgcgcatggtgatcgcgattgctaagtattttggctggcccctcgaccaactcgacgtggtgacagcattcctgtacgggataatgaaggaggtggtcttctgcgtggttccggaaggcgtcgaactggatggtgacttcgactgcctggaactggtgaaggccatctacggtctcaagcaagcttcgcgagggtggaacgagaccttcgacgagttcgtgtgctccatcggcttccaagtgtcggccttcgatccgtgcctctacatcaaggtggtggacggtcactgcgtgcttgtactggtgtacgtggatgacgtactgattaccgggagttcgcccgagctgatcgcacgcacgaagaccgacctgaagacgcgcttcgagctgaccgacagcggcaagcgcgcgtttgttcttgggatcgagttggtggacggcccggacggcagcgtgaccatgtgccagcggcgatacgtggacgacatcctgaagcgcttcgccatggacgagtgcaaggccgtggtgagtccggtggacatgagcactcgactggttccaagcgacgcggcgaccaaggtgaacgctccgtttcgcgaagctgttggtgctctgatgcacctgatgaccgccacgcgcccagacatcgcgtacgccgttggctatgtatcgcgcttcatggagaacccccaagaggaacactgggttgcggtcaagcgtatctttcgctacctgcaaggcaccaagacgcatgggatctgcttcaagccgggcgacaagatcgactttcgtggctactcggacgcggactgggccggcgacctcgccgaccgcaagtccacttcaggctacacgttcatgctcatgagtgcgcctgtgagctggggaagcaagaagcaatgaagcggagtacatcgcgctcagtctggctatccaagaaggcaagtggattcatcgcctgctatgcgagattctggcggccgctaatgagactggacccgaactcatgatccgcgaagacaaccagtcgtgcatcaagatgacgaagaacccagtgaaccacggtcgcgccaagcacatcgacatcaagtaccaccacatccgcgatgaagtcaagcgcggcgaagtcaagctccagtactgcgagacttctgtgatgctagcggacatcatgacgaaggcgcttacgggaccacgccacacggatctgacggtggctctcggcattcgtgggacttcgcattgagggggcgtattgagggttgctggtcttgggtactgtgtaccagttgtacccattaaccggttaacccgaaccggtccaatccgaacccacgttgattatggtgattacggtaagttgtttacgccaccgatgattagacgagtaggatgattggatgaacaccggtgagtgatggttgattagatgcactaggtgataggacgcagggtcgcgtgtctataacagtagggtgtaagctccaacaattcaatcactttcgaatattcattctacccctcaagtgccttcgctccggtcccgccgtctgcgacgtccctccctccgcttcgttcgagcttcgtgtccaagatccataccttccatcaatttacttgcctaatttaaatattaatttcaccttttataagttttcaatagctaaaaattgccggatttttcttggatgagtagcatatcactaaagtggggtaccgaaattaccaccatgaaaatttgaatttaggttattttcggcaaagtggaccctagatgaacgttcgtgacatacacgggacgcatatacaaccacggtgcaaccaagtatcaaacgcctgcaaaccgctatggacacgtttgacagcatcggagccgctaccacatgtaggccaatggtgacggaacgcgctctacgggcgctacagtcggtaaccaagaggagggaatcgtgggggcctttccgacggtttgcgaccatatggctaggctcgttagctatatcatgacgtaactagagctgcgcgactgtgcgtcggctcctcgaagccgatcttgctatcgtcagcggccggaatgcgcccaacaggcgctgctggtgggcaaggcgagaatcgggaccgaggccttctacgcggttgcaggctgcatgcgatggctcatcagatgtgtaacagggttacacacacaagcggctacagtcacttgtaactctaacagtcacgacgtctgttagaggttcgaaagactttctcgactttggtgtagacacaccaaaggctgcatacatttacgatcaccacgacgggtggttcatcgagacttaggattcctattggctgaaagcagcatcttttagccaatgagcgacatgcatagcgtaggaatgctgccaaccagtcgttggcagattcccaacttagaatattacatttagaggaagtcagaaacataaaacaaaaatagcagttctcattttaacccaaaaacattatttggatcgtttatttagattaatctatactcggagacccgagtataattaactctaagttaaactaagctacgcttcctcacatacacgcgtacacgtgtaagctaaagtagtgagccaaggtaggcccattacacctggtagcactttgtagtccgtccaacgaccgactacctgagttcgtacgtcaccgcacgaacgcagagctaagaaccttcccatggataaggaggtgtccatgaaaagctccactacgcctgcaactcacgttgcatgcgctgactgtcccctctgtcggacccagagtgggaagctctccaacgactgttaacagtcattggtgaggcggctgtagctacgatgctgcgtacgccaacgccgacagagcaacatggtgttgctctgggattcatcatgagggagcagcgagatgctgcttcgtttaccacggtgtcgtcggggacggcaccgcgcgcgcaatcgctgaagctcagcgtgagcaattacgttggaagagagggcgagcctctcctccgttggcttgtcgaactcgacactgccattgcggctcgacgcatcgtcgacccgttattgaaagtcgcgttcgcaatgtcatgtcttagcggacgtgcaagaagttgggcgtatgaacgccgattctcggatcctaggtgctttagcacgtacgagggtttcacggaagagctcagacaagcgtttgagcccccgcaaaacgagttccggtcgagggcggagttcctcgacctgcagcagggcaagcatgatgtccatgctcacgcgcagaaagcacggtacttggtctcgaacattgtgaccaacccgatagacgaggcgaccaaggtcgtcacgttcatgaagggtctgagagatgggcctgtaaagacctatctcttccgtgagtacccaggtactctcgaagctgcgattactcttgcgatgcaggaggagtttagtctgaggcaggctaaactacatgcgaatgcgccgaggctgcaaccgcctccggtcgcgatagcgggaggtccggaaccaatggacctctcgaatgcaacggctgctggttatcaacagcaacaaggaagtaatgtgcgatgctaccgttgcggtagagtcggtcactttgctcgggagtgcacggcccccgtgcaccagcagggtggctatcgcggcggtgccgggcaccgtcgcaaccaaacaaaaaacgctggacgtcagtaggggcggggcgccctactggtaatgcagttccgcgtgtcgacctcggacacgcgacactgaggactgcagtccccagtgaggttcattctcggtgcaagaaccaagatgacaagcctgaccttgtcatcctgaacgtgaactcgatgagagcaagcggctctctccgtgctttggtagattctggcgcgtcgaagaactttgttcgactgcgaagtctatcaaggcttgacttcgaggatttaaagatacctcgaagtatgttggaagtacgactggcaacgggtgccatcgtaaagacccagaagcgcatggtacgcgtgcgcttcacgtatgaagatcaagagtttgtcgagacctttatcgtcctggatctggacgataagtttgacattgtattgggcacgccgtggcttgcacggcatgatccggtcatcgattgggagaagcgcaatctcgtgcgcttcggtcgcgacagcggaacagtgagcgatggccctgttgccgctacgcacgcaccgacaggtgcgcgcgactcaccactcgagacggcgcctaatgccgctttcccggagcgccctgggcgcgcgcgagcacacgcgcaagagcagcaagcgtcggcgtcgccgccgacggctgaaggagaaaatgtgttgatctcggatatcaacacccgcttttcagcgaatcaggaagagtctccgacctcaaggggcacagatgacgcagacgagtcacacgcctcagccgtggaggctgacgcgaatctgattggatcaggtctgaccaataataagagccaaggtgacgtaacgccgtcaactccgggagtcgatagcttggacgaatttgattcgtcggctcggggagccgacgccccctccgtaatggagggctccgccaataacaggtgtcgaggtgaaaatggcgtgtcggctccgggagccgacgctgcaggcggtgcggacggtagcaaacgtcccgcaccggaaaaacttgcacgctgtcgtgcagccgggctgcacgacgaagcgccgggcgaccaagccgggcttgaagtcgctcgcccgcgggataaacccgccggcggtactgaagaacacccgtccacggctcggcctggacgggtcaagaaccaagcggagccgggctccgcagaacaagaagacggcgcatgcgaaggtcgctgcgcaagtctcggcctggggccgagacgctacaaggaatgtctaccgggcagacggaggcagagaagccgggcgtcgagacgttgaacgtcttgacgcgtacctgtgccgggttccggtacagggagatgactctcgctaaccctccgacacaagcatcggagttgacttcgcttccagtcatgagctggaagcgcttcgcgcgtgacttgcacgatggacgcatcgagcaaatatgcattctctcggacgccgagagaacgaagagcgagaatgaagaactgaggcagttctttatggagagcaccactgagagcgaggacacttcagtgcgaagacgaagaaggagcgctttgaagagcagagctgggactcgttgaaaacgagtccctactacgagatcttacgggagtacgcggacgtacttccggaagagattcctgcggagcttccgcaggacaagggaatccagcacgagattgatctcgtgccggggacgaagtactgtgtcacgcggcattggccactgccgcgagagcaggtcaaggcgatcgacgacttctttgagagtcgtcgcaaagctggacaagtgcgggaatcgaaatccccgcacagtgctccgacgttctgtgccaagaagccacagcgcggctagcgcatcgttcatgcatacaacaagctgaacgatgcgacgataccggcgcagacgccgatacctcgaaaagatgtcatcatcgattcgatggccaggagcactatctacagtgctcatgatctgcgcgatggattctatcagatcctcatgcgtgagagcgatatccctctcacggctgtgagcacgccgagcggcatactctgggagtggctggtgatgccgcaggggccgaagaacgcccctccgaccttcaacaggtgcgtgacgcacttgttgcgctcggtgcgcgacttcgcaccgagctacttcgacgatgtgttcgtccacagccgggctgcagacgggatgagtgatgttgagatgcgcaaggtgcatctccggaagctgcttgcgcatgagcgcaagcagaagctctacgcgaacctgaagaagtgcatcttcggggtaagcgagatacccgtgctcgggtgtctcgttgggaagaacggtgtccgccctgaccctgaggaggtcagagtgatcaatgagtggctgacgccgtcgaacgtcaaggaactgcggcagttccttggcttggccacgtacttgtgcaagtacgtgaaggactacgcgggcatgatacgcccgctgtcacagctcctgaagaaggacgccgagtggatttggactgctgagtgtcagcaggccttcgatgcagtcaagcggggcttgactgaggcgccgatcttggcggatgccgaccaagatcgcccattccacgttgtgtgtcacgcatccgacttcgcaatcggatgtgcgttgatgcagcacgatcacgagggccttgatcgtgtcgtctactaccaatcgcgtcagctgaagccagctgagcgcaactacccggtacatgacaaggagctccttgccatgaagtacgcactcgcgaagttccgagtgtatctactcggaagcaaaccgttcgtggtctatacggaccacgcgtcgctgcggacggctgtgaagtcgccgcatatctcgcaacggatggcgagatggctttcattcttcgtagagtataacttccgggttgattataaacccggaagactcaatgtggtggccgacgcgctctcgcgtcgacctgactacgccacgactgatgccgacgtcaatgccattgacgccatgcgatcgagcaccccaatgtcgtcactgttggtcgacgggaaggccgcgcacgacgcggacgcgaagctcttgctggcatatggctcagtaccttctgacaaagctcgtcagaagctgccgaagcatcttcgtgctcgtgcacaccgttatcgggtgcacgatgggttattactctacagtgcagtcgacgacaacgcggaccgcgttgtcgtgcccaatgaccatgaccagcggctcaggatcttgtatgggtatcacgatgcaccgactgcggggcatccgggccgtgagaagacataccttcttctcacgcgggacttctactgggcccaccagtataaatgggtgcgcaagtacgtccgtgcttgcgaggtttgtcaacgtgtgaagcctgcgcctttcgcgcgggctcccttgcagtcactgccgactccgtcggagtgttggcagtccatgtctttggacttcgtgttcggtcttcccccggacagccaggggaacacgggcgttgtggtctttgctgaccgcttcagcaagatggtacatcttgctgcggtacccgctgaagtgactgcgaaacagacggctcgtctgttcgttgacatggtgttcaaacaccatggcatgccaatcgacattgtgtcggatcgagatccgcgcttcactgcacacctttggcaagaagtgtttacacttcttgggagtcaactttcgatgtcgactgcggaccatccgcagacggacgggcagaccgagcgcgtgaaccgcgtgctcgtagacgtgcttaagagctacgctcactcgttccaacactggagcgactgcctgccgatggcggagttcgccatcaacaactcggtgcatgcctcgaccaagcatacaccgttctacgtgaatgccatcaggcacccacgcctcccgagtctactcgggatggtggctccttccttaagtgggggggggatctacgactgcaacgcagcagccgcagaatgccgctgacacttgcacagtgtcagccgcaactacgcgcaagaagaacaagaagcacgcgtctgtgcagggcacagacgccgataagagcaagcagaagaagaacgggtctgtgcagggcacagacaccgcgaagaccaacgcagaggccgggtctactgctagaaacgagctgaactcgttcagctcggacgcaatcaacttcgtgcaacgcagacaagccgtcattcggtttgtccaagacgctattgcagcttctgtcgactgacagaagctgaacgcagacaatgttggtaggggcaacactaatgaattcaagaaggattcattggttttgttagcaactcaaaacctgcctaaacctgcggtttccgacattggggcgagcaagctcgctccgcgcattatcgggccgttcacgttgttggcacgacatggaacgcctacacgctagatactccatctagcatgcgcctccatccgaccttttacgtcaggcggctgaagccataccggcagcacgagccacctagcttggctggcccgaagcggaagccccagcggaagcgaacctccgctccagcgcgtgaacacgttgggacgagcgcacgacgcgacctcccacgtcgatagagatgtccgacgcgctctgcgaggcctgatcaacttgagctgtcagggtcgccatctcctgcttcagagcggcgaactcacggctctgaagctgctccacagcagcgactcgctcctcgagggtcgggccaaggtcaatcccaggttgatcatacccggggcgtgttcccaccaccgccgcctccgatccgcgacgcccgcgggtcaacacgctggattgttgagcgtattgtggaccatagtatcccgaaaacgaaccggcaaccggttcgttatcgtattcgttggagaggatttccgccccaccaagatacatgggagccacgggacgtcctgctgcaggacgttccggaaatggtgagggcgtaggaagctcaccacgcgctgccgacgcgaaggtagtgcgagcgctgtggtcacctacagcgcccgaggtcccacgatcgtcgcgttcctcgcgtgccaagaacttggcacggagatccttgagactctcaggtacacgaatcgtcgtgtacccgtttaggtcgcggtcgctcaagcgcacccgcacccggaagacacaacgtgcactgatggccttcgggcacagcgcatggaataccagcgtccacagaggatctgtggagctgctccagcctcccgcgcgtcgagaatgtctcgaagcgctcacgggcatgcttaacccgctcacggtaagcagccggcttcttgttgaagttctcaacaaaagcattccaactttgacaaagtgcctgccactcaggcactttgctgcgagaagaggtattcttgctggagaagtatcggagctcctgaaagagtccgatatagtaatcgcgcctttgattcgttaacggatcaaagtgctgctcctccgccacagcatcatcgtggatcccgctgcatacgtacagcgggatttcagttggaggcacggtgttgcccacacggtctccgatctatgacgcagacagcatccacggatcgcgcgctgcctgagcagcgcgcggagaacttgaagacccacctcacgcggggagcttaaagccccagcagcggagagcggagtgtcgctttcgccgcgcgaacgcttcgagcttgaagcgtccgaatcgtctccttcacgagggcgtctcgacccggcatgcgggtcgagactatcactgtcgatagactccttgcgcttgttggaagaggcctcgccctcttccatctccacgtcatcatccccgtagtcaacggcgtcgttgactacagaggaaccttcgaggacaatctccgactgggttgtccccgacgcggcctttgcagcgagcgcatcgcgctttgcctgctggcgctcatggtactgagcaacagagagcttaccctctgttggggcggcggtcttcttctgagacgagctcattgcggaatgagctcgagttttctttctcccaatgtgaaaaattgacgaatggtcaatttcccgattaacgtgccgtgactcggcgcgtctaaccttgagggggggatggtgtaacagggttacacacacaagcggctacagtcacttgtaactctaacagtcacgacgtctgttagaggttcgaaagactttctcgactttggtgtagacacaccaaaggctgcatacatttacgatcaccacgacgggtggttcatcgagacttaggattcctattggctgaaagcagcatcttttagccaatgagcgacatgcatagcgtaggaatgctgccaaccagtcgttggcagattcccaacttagaatattacatttagaggaagtcagaaacataaaacaaaaatagcagttctcattttaacccaaaaacattatttggatcgtttatttagattaatctatactcggaggcccgagtttaataaactacgctacgcttcctcacacacttgcgcgcacgtgtaagctaaagtagtgagcgaaagtaggcccattacaagatgcgtccggtcatggcgataccgtttgcgctctaatttaccgccaacgagccattggcgccatcgctaggggccgtatagccactggtggtgggctgctggtgggcaaggcgagaatcgggaccgaggccttctgcacggttgcaggctgcgtggggtggctcagcggatgtggctggccatggcgataccatttgcgcgctaatttaccaccaacgagccattggcgccatcgctagaggccgtgtagccactggtggtgggctgctggtggccaaggcgagaatcgggaccgaggccttctgcacggttgcaggctgcgtggggtggctcagcggacgtggctagccatggcgataccatttgcgctctaattgaccgccaacgagccattggcgccatcgctagggaccgtgtagccactggtggtgggctgctggtggccaaggcgagaatcgggaccgaggccttctgcacggttgcaggctgcgtggggtggctcagcggatgtggctggccatggcgataccatttgcgctctaatttaccaccaacgagccattggcgccatcgctagaggccgtgtagccactggtggtgggctgctggtggccaaggcgagaatcgggaccgaggccttctgcacggttgcaggctgcgtggggtggctcagcggatgtggctggccatggcgataccatttgcgctctaatttaccaccaacgagccattggcgccatcgctagaggccgtgtagccactggtggtgggctgctggtggccaaggcgagaatcgggaccgaggccttctgcacggttgcaggctgcgtggggtggctcagcggacgtggctggccatgacgataccatttgcgctctaatttaccaccaacgagccattggcgccatcgctagaggccgtgtagccactggtggtgggctgctggtggccaaggcgagaatcgggaccgaggccttctgcacggttgcaggctgcgtggggaggctcagcggatgtggctggccatggcgataccatttgcgctctaatttaccaccaacgagccattggcgccatcgctagaggccgtgtagccactggtggtgggctgctggtggccaaggcgagaatcgggaccgaggccttctgcacggttgcaggctgcgtggggtggctcagcggacgtggctggccatggcgataccatttgcgctctaatttaccaccaacgagccattggcgccatcgctagaggccgtgtagccactggtggtgggctgctggtggccaaggcgagaatcgggaccgaggccttctgcacggttgcaggctgcgtggggtggctcagcggatgtggctggccatggcgataccatttgcgctctaatttaccaccaacgagccattggcgccatcgctagaggccgtgtagccactggtggtgggctgctggtggccaaggcgagaatcgggaccgaggccttctgcacggttgcaggctgcgtggggtggctcagcggatgtggctggccatggcgataccatttgcgcactaatttaccaccaacgagccattggcgccatcgctagaggccgtgtagccactggtggtgggctgctggtgggcaaggcgagaatcgggaccgaggccttctgcacggttgcaggctgcgtggggtggctcagcggatgtggctggccatggcgataccatttgcgctctaatttaccaccaacgagccattggcgccatcgctagaggccgtgtagccactggtggtgggctgctggtggccaaggcgagaatcgggaccgaggccttctgcacggttgcaggccgcgtggggtggctcagcggatgtggctggccatggcgataccatttgcgctctaattgaccgccaacgagccattggcgccatcgctaggggccgtgtagccactggtggtgggctgctggtggccaaggcgagaatcgggaccgaggccttctgcacggttgcaggctgcgtggggtggctcagcggatgtggctggccatggcgataccatttgcgcactaattgaccgacaacgagccattggcgccatcgctaggggccgtgtagccactggtggtgggctgctggtgggcaaggcgagaatcgggaccgaggccttctgcacggttgcaggccgcgtggggtggctcagcggatgtggctggccatggcgataccatttgcgctctaattgaccgacaacgagccattggcgccatcgctaggggccgtgtagccactggtggtgggctgctggtgggcaaggcgagaatcgggaccgaggccttctgcacggttgcaggccgcgtggggtggctcagcggatgtggctggccatggcgataccatttgcgctctaattgaccgacaacgagccattggcgccatcgctaggggccgtgtagccactggtggtgggctgctggtgggcaaggcgagaatcgggaccgaggccttctgcacggttgcaggctgcgtggggtggctcagcggatgtggctggccatggcgataccatttgcgcactaattgaccgacaacgagccattggcgccatcgctaggggccgtgtagccactggtggtgggctgctggtggccaaggcgagaatcgggaccgaggccttctgcacggttgcaggccgcgtggggtggctcagcggatgtggctggccatggcgataccatttgcgctctaatttaccaccaacgagccattggcgccatcgctaggggccgtgtagccactggtggtgggctgctggtgggcaaggcgagaatcgggaccgaggccttctgcacggttgcaagccgcgtggggtggctcagcggatgtggctggccatggcgataccatttgcgcactaatttaccaccaacgagccattggcgccatcgctaggggccgtgtagccactggtggtgggctgctggtgggcaaggcgagaatcgggaccgaggccttctgcacggttgcaggccgcgtggggtggctcagcggatgtggctggccatggcgataccatttgcgcactaattgaccaacaacgagccattggcgccatcgctaggggccgtgtagccactggtggtgggctgctggtggccaaggcgagaatcgggaccgaggccttctgcacggttgcaggccgcgtggggtggctcagcggatgtggctggccatggcgataccatttgcgcactaatttaccaccaacgagccattggcgccatcgctagaggccgtgtagccactggtggtgggctgctggtggccaaggcgagaatcgggaccgaggccttctgcacggttgcaggccgcgtggggtggctcagcggatgtggctggccatggcgataccatttgcgctctaattgaccgacaacgagccattggcgccatcgctagaggccgtgtagccagtggtggtgggctgctggtggccaaggcgagaatcgggaccgaggccttctgcacggttgcaggctgcgtggggtggctcagcggacgtggctggccatggcgataccatttgcgctctaatttaccaccaacgagccattggcgccatcgctagaggccgtgtagccactggtggtgggctgctggtggccaaggcgagaatcgggaccgaggccttctgcacggttgcaggctgcgtggggtggctcagcggacgtggctggccatggcgataccatttgcgctctaatttaccaccaacgagccattggcgccatcgctagaggccgtgtagccactggtggtgggctgctggtggccaaggcgagaatcgggaccgaggccttctgcacggttgcaggccgcgtggggtggctcagcggatgtggctggccatggcgataccatttgcgctctaatttaccaccaacgagccattggcgccatcgctaagggccgtgtagccactggtggtgggctgctggtgggcaaggcgagaatcgggaccgaggccttctgcacggttgcaggccgcgtggggtggctcagcggatgtggctggccatggcgataccatttgcgctctaatttaccaccaacgagccattggcgccatcgctaggggccgtgtagccactggtggtgggctgctggtggccaaggcgagaatcgggaccgaggccttctgcacggttgcaggctgcgtggggtggctcagcggatgtggctggccatggcgataccatttgcgctctaatttaccaccaacgagccattggcgccatcgctaagggccgtgtagccactggtggtgggctgctggtgggcaaggcgagaatcgggaccgaggccttctgcacggttgcaggccgcgtggggtggctcagcggatgtggctggccatggcgataccatttgcgctctaatttaccaccaacgagccattggcgccatcgctaggggccgtgtagccactggtggtgggctgctggtggccaaggcgagaatcgggaccgaggccttctgcacggttgcaggctgcgtggggtggctcagcggatgtggctggccatggcgataccatttgcgctctaattgaccaccaacgagccattggcgccatcgctagaggccgtgtagccactggtggtgggctgctggtggccaaggcgagaatcgggaccgaggccttctgcacggttgcaggccgcgtggggtggctcagcggatgtggctggccatggcgataccatttgcgctctaatttaccaccaacgagccattggcgccatcgctaggggccgtgtagccactggtggtgggctgctggtggccaaggcgagaatcgggaccgaggccttctgcacggttgcaggccgcgtggggtggctcagcggatgtggctggccatggcgataccatttgcgcactaatttaccaccaacgagccattggcgccatcgctagaggccgtgtagccactggtggtgggctgctggtggccaaggcgagaatcgggaccgaggccttctgcacggttgcaggctgcgtggggtggctcagcggatgtggctggccatggcgataccatttgcgctctaatttaccaccaacgagccattggcgccatcgctaggggccgtgtagccactggtggtgggctgctggtgggcaaggcgagaatcgggaccgaggccttctgcacggttgcaggctgcgtggggtggctcagcggatgtggctggccatggcgataccatttgcgcactaatttaccaccaacgagccaatggcgccatcgctaggggccgtgtagccactggtggtgggctgctggtgggcaaggcgagaatcgggaccgaggccttctgcacggttgcaggctgcgtggggtggctcagcggatgtggctggccatggcgataccatttgcgcactaatttaccaccaacgagccattggcgccatcgctagaggccgtgtagccactggtggtgggctgctggtggccaaggcgagaatcgggaccgaggccttctgcacggttgcaggctgcgtggggtggctcagcggatgtggctggccatggcgataccatttgcgctctaatttaccaccaacgagccattggcgccatcgctagaggccgtgtagccactggtggtgggctgctggtggccaaggcgagaatcgggaccgaggccttctgcacggttgcaggccgcgtggggtggctcagcggatgtggctggccatggcgataccatttgcgctctaattgaccgacaacgagccattggcgccatcgctagaggccgtgtagccactggtggtgggctgctggtggccaaggcgagaatcgggaccgaggccttctgcacggttgcaggctgcgtggggtggctcagcggacgtggctggccatggcgataccatttgcgctctaatttaccaccaacgagccattggcgccatcgctagaggccgtgtagccactggtggtgggctgctggtggccaaggcgagaatcgggaccgaggccttctgcacggttgcaggccgcgtggggtggctcagcggatgtggctggccatggcgataccatttgcgctctaattgaccgacaacgagccattggcgccatcgctagaggccgtgtagccactggtggtgggctgctggtggccaaggcgagaatcgggaccgaggccttctgcacggttgcaggctgcgtggggtggctcagcggacgtggctggccatggcgataccatttgcgctctaatttaccaccaacgagccattggcgccatcgctagaggccgtgtagccactggtggtgggctgctggtggccaaggcgagaatcgggaccgaggccttctgcacggttgcaggctgcgtggggtggctcagcggacgtggctggccatggcgataccatttgcgctctaatttaccaccaacgagccattggcgccatcgctagaggccgtgtagccactggtggtgggctgctggtggccaaggcgagaatcgggaccgaggccttctgcacggttgcaggctgcgtggggtggctcagcggatgtggctggccatggcgataccatttgcgctctaatttaccaccaacgagccattggcgccatcgctagaggccgtgtagccactggtggtgggctgctggtggccaaggcgagaatcgggaccgaggccttctgcacggttgcaggctgcgtggggtggctcagcggatgtggctggccatggcgataccatttgcgcactaattgaccgacaacgagccattggcgccatcgctaggggccgtgtagccactggtggtgggctgctggtggccaaggcgagaatcgggaccgaggccttctgcacggttgcaggccgcgtggggtggcttggtggacatggctagccgtggcgatactatttgcgctctaatataccgctaacgatccatgggtactgtnnnnnnnnnnnnnnnnnnnnnnnnnnnnnnnnnnnnnnnnnnnnnnnnnnnnnnnnnnnnnnnnnnnnnnnnnnnnnnnnnnnnnnnnnnnnnnnnnnnnnnnnnnnnnnnnnnnnnnnnnnnnnnnnnnnnnnnnnnnnnnnnnnnnnnnnnnnnnnnnnnnnnnnnnnnnnnnnnnnnnnnnnnnnnnnnnnnnnnnnnnnnnnnnnnnnnnnnnnnnnnnnnnnnnnnnnnnnnnnnnnnnnnnnnnnnnnnnnnnnnnnnnnnnnnnnnnnnnnnnnnnnnnnnnnnnncgagccaatggcgccatcgctaggggccgtgtagccacaggtggtgggctgctggtgggcaaggcgagaatcgggaccgaggccttctgcacggttgcaggctgcgtggggtggctcagcggatgtggctggccatggcgataccatttgcgctctaatttaccaccaacgagccattggcgccatcgctagaggccgtgtagccactggtggtgggctgctggtggccaaggcgagaatcgggaccgaggccttctgcacggttgcaggctgcgtggggtggctcagcggatgtggctggccatggcgataccatttgcgcattaatttaccaccaacgagccaatggcgccatcgctaggggccgtgtagccacaggtggtgggctgctggtgggcaaggcgagaatcgggaccgaggccttctgcacggttgcaggccgcgtggggtggctcagcggatgtggctggccatggcgataccatttgcgcactaatttaccaccaacgagccattggcgccatcgctaggggccgtgtagccacaggtggtgggctgctggtgggcaaggcgagaatcgggaccgaggccttctgcacggttgcaggctgcgtggggtggctcagcggatgtggctggccatggcgataccatttgcgctctaatttaccaccaacgagccattggcgccatcgctagaggccgtgtagccactggtggtgggctgctggtggccaaggcgagaatcgggaccgaggccttctgcacggttgcaggctgcgtggggtggctcagcggatgtggctggccatggcgataccatttgcgctctaatataccaccaacgagccattggcgccatcgctagaggccgtgtagccactggtggtgggctgctggtggccaaggcgagaatcgggaccgaggccttctgcacggttgcaggctgcgtggggtggctcagcggatgtggctggccatggcgataccatttgcgctctaatataccaccaacgagccattggcgccatcgctagaggccgtgtagccactggtggtgggctgctggtggccaaggcgagaatcgggaccgaggccttctgcacggttgcaggctgcgtggggtggctcagcggatgtggctggccatggcgataccatttgcgcgctaatataccaccaacgagccattggcgccatcgctagaggccgtgtagccactggtggtgggctgctggtggccaaggcgagaatcgggaccgaggccttctgcacggttgcaggctgcgtggggtggctcagcggatgtggctggccatggcgataccatttgcgcgctaatataccaccaacgagccattggcgccatcgctagaggccgtgtagccactggtggtgggctgctggtggccaaggcgagaatcgggaccgaggccttctgcacggttgcaggctccgtggggtggctcagcggatgtggctggccatggcgataccatttgcgcgctaatataccaccaacgagccattggcgccatcgctagaggccgtgtagccactggtggtgggctgctggtggccaaggcgagaatcgggaccgaggccttctgcacggttgcaggctgcgtggggtggctcagcggatgtggctgggcatggcgataccatttgcgctctaatataccaccaacgagccattggcgccatcgctagaggccgtgtagccactggtggtgggctgctggtggccaaggcgagaatcgggaccgaggccttctgcacggttgcaggctgcgtggggtggctcagcggatgtggctggccatggcgataccatttgcgctctaatttaccaccaacgagccattggcgccatcgctagaggccgtgtagccactggtggtgggctgctggtggccaaggcgagaatcgggaccgaggccttctgcacggttgcaggctgcgtggggtggctcagcggatgtggctggccatggcgataccatttgcgcgctaatataccaccaacgagccattggcgccatcgctagaggccgtgtagccactggtggtgggctgctggtggccaaggcgagaatcgggaccgaggccttctgcacggttgcaggctgcgtggggtggctcagcggatgtggctggtcatggcgataccatttgcgcgctaatataccaccaacgagccattggcgccatcgctagaggccgtgtagccactggtggtgggctgctggtggccaaggcgagaatcgggaccgaggccttctgcacggttgcaggctgcgtggggtggctcagcggatgtggctggccatggcgataccatttgcgcactaatttaccacgaacgagccattggcgccatcgctaggggccgtgtagccactggtggtgggctgctggtggccaaggcgagaatcgggaccgaggccttctgcacggttgcaggccgcgtggggtggctcagcggatgtggctggccatggcgataccatttgcgctctaatttaccacgaacgagccattggcgccatcgctaggggccgtgtagccactggtggtgggctgctggtggccaaggcgagaatcgggaccgaggccttctgcacggttgcaggccgcgtggggtggctcagcggatgtggctggccatggcgataccatttgcgcactaatttaccaccaacgagccaatggcgccatcgctaggggccgtgtagccacaggtggtgggctgctggtgggcaaggcgagaatcgggaccgaggccttctgcacggttgcaggccgcgtggggtggctcagcggatgtggctggccatggcgataccatttgcgcactaatttaccaccaacgagccaatggcgccatcgctaggggccgtgtagccactggtggtgggctgctggtgggcaaggcgagaatcgggaccgaggccttctgcacggttgcaggctgcgtggggtggctcagcggatgtggctggccatggcgataccatttgcgctctaatttaccaccaacgagccattggcgccatcgctagaggccgtgtagccactggtggtgggctgctggtggccaaggcgagaatcgggaccgaggccttctgcacggttgcaggctgcgtagggtggctcagcggatgtggctggccatggcgataccatttgcgctctaatttaccaccaacgagccattggcgccatcgctagaggccgtgtagccactgctggtgggctgctggtggccaaggcgagaatcgggaccgaggccttctgcacggttgcaggctgcgtggggtggctcagcggatgtggctggccatggcgataccatttgcgctctaatttaccaccaacgagccaatggcgccatcgctagaggccgtgtagccactggtggtgggctgctggtgggcaaggcgagaatcgggaccgaggccttctgcacggttgcaggctgcgtggggtggctcagcggatgtggctggccatggcgataccatttgccctctaatttaccaccaacgagccattggcgccatcgctaggggccgtgtagccactggtggtgggctgctggtggccaaggcgagaatcgggaccgaggccttctgcacggttgcaggccgcgtggggtggctcagcggatgtggctggccatggcgataccatttgcgcactaatttaccaccaacgagccattggcgccatcgctagaggccgtgtagccactggtggtgggctgctggtggccaaggcgagaatcgggaccgaggccttctgcacggttgcaggccgcgtggggtggctcagcggatgtggctggccatggcgataccatttgcgctctaatttaccaccaacgagccattggcgccatcgctagaggccgtgtagccacaggtggtgggctgctggtggccaaggcgagaatcgggaccgaggccttttgcacggttgcaggccgcgtggggtggctcagcggatgtggctggccatggcgataccatttgcgcactaatttaccaccaacgagccattggcgccatcgctagaggccgtgtagccactggtggtgggctgctggtggccaaggcgagaatcgggaccgaggccttctgcacggttgcaggctgcgtggggtggctcagcggatgtggctggccatggcgataccttttgcgctctaatttaccaccaacgagccaatggcgccatcgctaggggccgtgtagccactggtggtgggctgctggtgggcaaggcgagaatcgggaccgaggccttctacacggttgcaggctgcgtggggtggctcagcggatgtggctggccatggcgataccatttgcgcactaatttaccaccaacgagccattggcgccatcgctagaggccgtgtagccactggtggtgggctgctggtggccaaggcgagaatcgggaccgaggccttctgcacggttgcaggctgcgtggggtggctcagcggatgtggctggccatggcgataccatttgcgctctaatttaccacgaacgagccattggcgccatcgctagaggccgtgtagccactggtggtgggctgctggtggccaaggcgagaatcgggaccgaggccttctgcacggttgcaggctgcgtggggtggctcagcggatgtggctggccatggcgataccatttgcgcactaatttaccaccaacgagccattggcgccatcgctaggggccgtgtagccactggtggtgggctgctggtggccaaggcgagaatcgggaccgaggccttctgcacggttgcaggctgcgtggggtggctcagcggatgtggctggccatggcgataccatttgcgcactaatttaccacgaacgagccattggcgccatcgctaggggccgtgtagccactggtggtgggctgctggtggccaaggcgagaatcgggaccgaggccttctgcacggttgcaggccgcgtggggtggctcagcggatgtggctggccatggcgataccatttgcgctctaatttaccacgaacgagccattggcgccatcgctaggggccgtgtagccactggtggtgggctgctggtggccaaggcgagaatcgggaccgaggccttctgcacggttgcaggccgcgtggggtggctcagcggatgtggctggccatggcgataccatttgcgcactaatttaccacgaacgagccattggcgccatcgctaggggccgtgtagccagaggtggtgggctgctggtggccaaggcgagaatcgggaccgaggccttctgcacggttgcaggccgcgtggggtggctcagcggatgtggctggccatggcgataccatttgcgctctaatttaccacgaacgagccaatggcgccatcgctaggggccgtgtagccacaggtggtgggctgctggtgggcaaggcgagaatcgggaccgaggccttctgcacggttgcaggctgcgtggggtggctcagcggatgtggctggccatggcgataccatttgcgctctaatttaccaccaacgagccattggcgccatcgctagaggccgtgtagccactggtggtgggctgctggtggccaaggcgagaatcgggaccgaggccttctgcacggttgcaggccgcgtggggtggctcagcggatgtggctggccatggcgataccatttgcgctctaatttaccacgaacgagccattggcgccatcgctagaggccgtgtagccactgctggtgggctgctggtggccaaggcaagaatcgggaccgaggccttctgcacggttgcaggctgcgtggggtggctcagcggatgtggctggccatggcgataccatttgcgcactaattgaccgacaacgagccattggcgccatcgctaggggccgtgtagccactggtggtgggctgctggtgggcaaggcgagaatcgggaccgaggccttctgcacggttgcaggccgcgtggggtggctcagcggatgtggctggccatggcgataccatttgcgcactaatttaccacgaacgagccattggcgccatcgctaggggccgtgtagccactggtggtgggctgctggtggccaaggcgagaatcgggaccgaggccttctgcacggttgcaggccgcgtggggtggctcagcggatgtggctggccatggcgataccatttgcgcattaatttaccaccaacgagccattggcgccatcgctagaggccgtgtagccactgctggtgggctgctggtggccaaggcgagaatcgggaccgaggccttctgcacggttgcaggccgcgtggggtggctcagcggatgtggctggccatggcgataccatttgcgctctaatttaccaccaacgagccattggcgccatcgctagaggccgtgtagccactgctggtgggctgctggtggccaaggcaagaatcgggaccgaggccttctgcacggttgcaggctgcgtggggtggctcagcggatgtggctggccatggcgataccatttgcgcactaattgaccaacaacgagccattggcgccatcgctaggggccgtgtagccactgctggtgggctgctggtgggcannnnnnnnnnnnnnnnnnnnnnnnnnnnnnnnnnnnnnnnnnnnnnnnnnnnnnnnnnnnnnnnnnnnnnnnnnnnnnnnnnnnnnnnnnnnnnnnnnnnnnnnnnnnnnnnnnnnnnnnnnnnnnnnnnnnnnnnnnnnnnnnnnnnnnnnnnnnnnnnnnnnnnnnnnnnnnnnnnnnnnnnnnnnnnnnnnnnnnnnnnnnnnnnnnnnnnnnnnnnnnnnnnnnnnnnnnnnnnnnnnnnnnnnnnnnnnnnnnnnnnnnnnnnnnnnnnnnnnnnnnnnnnnnnnnnnnnnnnnnnnnnnnnnnnnnnnnnnnnnnnnnnnnnnnnnnnnnnnnnnnnnnnnnnnnnnnnnnnnnnnnnnnnnnnnnnnnnnnnnnnnnnnnnnnnnnnnnnnnnnnnnnnnnnnnnnnnnnnnnnnnnnnnnnnnnnnnnnnnnnnnnnnnnnnnnnnnnnnnnnnnnnnnnnnnnnnnnnnnnnnnnnnnnnnnnnnnnnnnnnnnnnnnnnnnnnnnnnnnnnnnnnnnnnnnnnnnnnnnnnnnnnnnnnnnnnnnnnnnnnnnnnnnnnnnnnnnnnnnnnnnnnnnnnnnnnnnnnnnnnnnnnnnnnnnnnnnnnnnnnnnnnnnnnnnnnnnnnnnnnnnnnnnnnnnnnnnnnnnnnnnnnnnnnnnnnnnnnnnnnnnnnnnnnnnnnnnnnnnnnnnnnnnnnnnnnnnnnnnnnnnnnnnnnnnnnnnnnnnnnnnnnnnnnnnnnnnnnnnnnnnnnnnnnnnnnnnnnnnnnnnnnnnnnnnnnnnnnnnnnnnnnnnnnnnnnnnnnnnnnnnnnnnnnnnnnnnnnnnnnnnnnnnnnnnnnnnnnnnnnnnnnnnnnnnnnnnnnnnnnnnnnnnnnnnnnnnnnnnnnnnnnnnnnnnnnnnnnnnnnnnnnnnnnnnnnnnnnnnnnnnnnnnnnnnnnnnnnnnnnnnnnnnnnnnnnnnnnnnnnnnnnnnnnnnnnnnnnnnnnnnnnnnnnnnnnnnnnnnnnnnnnnnnnnnnnnnnnnnnnnnnnnnnnnnnnnnnnnnnnnnnnnnnnnnnnnnnnnnnnnnnnnnnnnnnnnnnnnnnnnnnnnnnnnnnnnnnnnnnnnnnnnnnnnnnnnnnnnnnnnnnnnnnnnnnnnnnnnnnnnnnnnnnnnnnnnnnnnnnnnnnnnnnnnnnnnnnnnnnnnnnnnnnnnnnnnnnnnnnnnnnnnnnnnnnnnnnnnnnnnnnnnnnnnnnnnnnnnnnnnnnnnnnnnnnnnnnnnnnnnnnnnnnnnnnnnnnnnnnnnnnnnnnnnnnnnnnnnnnnnnnnnnnnnnnnnnnnnnnnnnnnnnnnnnnnnnnnnnnnnnnnnnnnnnnnnnnnnnnnnnnnnnnnnnnnnnnnnnnnnnnnnnnnnnnnnnnnnnnnnnnnnnnnnnnnnnnnnnnnnnnnnnnnnnnnnnnnnnnnnnnnnnnnnnnnnnnnnnnnnnnnnnnnnnnnnnnnnnnnnnnnnnnnnnnnnnnnnnnnnnnnnnnnnnnnnngtgtagccacaggtggtgggctgctggtgggcaaggcgagaatcgggaccgaggccttctgcacggttgcaggctgcgtggggtggctcagcggacgtggctggccatggcgataccatttgcgctctaattgaccgacaacgagccattggcgccatcgctagaggccgtgtagccacaggtggtgggctgctggtgggcaaggcgagaatcgggaccgaggccttctgcacggttgcaggccgcgtggggtggctcagcggatgtggctggccatggcgataccatttgcgctctaatttaccaccaacgagccattggcgccatcgctagaggccgtgtagccactggtggtgggctgctggtggccaaggcgagaatcgggaccgaggccttctgcacggttgcaggccgcgtggggtggctcagcggatgtggctggccatggcgataccatttgcgcactaatttaccaccaacgagccattggcgccatcgctaggggccgtgtagccactggtggtgggctgctggtgggcaaggcgagaatcgggaccgaggccttctgcacggttgcaggccgcgtggggtggctcagcggatgtggctggccatggcgataccatttgcgctctaatttaccaccaacgagccattggcgccatcgctagaggccgtgtagccactggtggtgggctgctggtgggcaaggcgagaatcgggaccgaggccttctgcacggttgcaggccgcgtggggtggctcagcggatgtggctggccatggcgataccatttgcgctctaatttaccaccaacgagccattggcgccatcgctagaggccgtgtagccactggtggtgggctgctggtgggcaaggcgagaatcgggaccgaggccttctgcacggttgcaggctgcgtggggtggctcagcggatgtggctggccatggcgataccatttgcgctctaatttaccaccaacgagccattggcgccatcgctagaggccgtgtagccactggtggtgggctgctggtgggcaaggcgagaatcgggaccgaggccttctgcacggttgcaggccgcgtggggtggctcagcggatgtggctggccatggcgataccatttgcgctctaatttaccaccaacgagccattggcgccatcgctagaggccgtgtagccactggtggtgggctgctggtgggcaaggcgagaatcgggaccgaggccttctgcacggttgcaggccgcgtggggtggctcagcggatgtggctggccatggcgataccatttgcgctctaatttaccaccaacgagccattggcgccatcgctagaggccgtgtagccactggtggtgggctgctggtggccaaggcgagaatcgggaccgaggccttctgcacggttgcaggctgcgtggggtggctcagcggatgtggctggccatggcgataccatttgcgctctaatttaccaccaacgagccattggcgccatcgctaggggccgtgtagccactggtggtgggctgctggtggccaaggcgagaatcgggaccgaggccttctgcacggttgcaggctgcttggggtggctcagcggatgtggctggccatggcgataccatttgcgctctaatttaccaccaacgagccattggcgccatcgctagaggccgtgtagccactggtggtgggctgctggtggccaaggcgagaatcgggaccgaggccttctgcacggttgcaggctgcgtggggtggctcagcggatgtggctggccatggcgataccatttgcgctctaatttaccaccaacgagccattggcgccatcgctagaggccgtgtagccactggtggtgggctgctggtggccaaggcgagaatcgggaccgaggccttctgcacggttgcaggctgcgtggggtggctcagcggatgtggctggccatggcgataccatttgcgcactaatttaccacgaacgagccattggcgccatcgctagaggccgtgtagccactgctggtgggctgctggtggccaaggcgagaatcgggaccgaggccttctgcacggttgcaggctgcgtggggtggctcagcggatgtggctggccatggcgataccatttgcgcactaattgaccgacaacgagccattggcgccatcgctaggggccgtgtagccactggtggtgggctgctggtgggcaaggcgagaatcgggaccgaggccttctgcacggttgcaggccgcgtggggtggctcagcggatgtggctggccatggcgataccatttgcgcactaatttaccaccaacgagccattggcgccatcgctagaggccgtgtagccactggtggtgggctgctggtggccaaggcgagaatcgggaccgaggccttctgcacggttgcaggccgcgtggggtggctcagcggatgtggctggccatggcgataccatttgcgctctaattgaccgacaacgagccattggcgccatcgctaggggccgtgtagccactggtggtgggctgctggtgggcaaggcgagaatcgggaccgaggccttctgcacggttgcaggccgcgtggggtggctcagcggatgtggctggccatggcgataccatttgcgctctaatttaccaccaacgagccattggcgccatcgctaggggccgtgtagccactggtggtgggctgctggtgggcaaggcgagaatcgggaccgaggccttctgcacggttgcaggccgcgtggggtggctcagcggatgtggctggccatggcgataccatttgcgctctaatttaccaccaacgagccattggcgccatcgctaggggccgtgtagccactggtggtgggctgctggtgggcaaggcgagaatcgggaccgaggccttctgcacggttgcaggccgcgtggggtggctcagcggatgtggctggccatggcgataccatttgcgcactaattgaccgacaacgagccattggcgccatcgctaggggccgtgtagccactggtggtgggctgctggtgggcaaggcgagaatcgggaccgaggctttctgcacggttgcaggccgcgtggggtggctcagcggatgtggctggccatggcgataccatttgcgctctaatttaccacgaacgagccattggcgccatcgctaggggccgtgtagccactggtggtgggctgctggtggccaaggcgagaatcgggaccgaggccttctgcacggttgcaggctgcgtggggtggctcagcggatgtggctggccatggcgataccatttgcgcactaatttaccaccaacgagccaatggcgccatcgctaggggccgtgtagccacaggtggtgggctgctggtggccaaggcgagaatcgggaccgaggccttctgcacggttgcaggctgcgtggggtggctcagcggatgtggctggccatggcgataccatttgcgctctaatttaccaccaacgagccattggcgccatcgctagaggccgtgtagccactggtggtgggctgctggtggccaaggcgagaatcgggaccgaggccttctgcacggttgcaggccgcgtggggtggctcagcggatgtggctggccatggcgataccatttgcgctctaatttaccaccaacgagccattggcgccatcgctagaggccgtgtagccactggtggtgggctgctggtgggcaaggcgagaatcgggaccgaggccttctgcacggttgcaggccgcgtggggtggctcagcggatgtggctggccatggcgataccatttgcgctctaatttaccaccaacgagccattggcgccatcgctaggggccgtgtagccactggtggtgggctgctggtgggcaaggcgagaatcgggaccgaggctttctgcacggttgcaggccgcgtggggtggctcagcggatgtggctggccatggcgataccatttgcgctctaatttaccaccaacgagccattggcgccatcgctaggggccgtgtagccactggtggtgggctgctggtggccaaggcgagaatcgggaccgaggccttctgcacggttgcaggccgcgtggggtggctcagcggatgtggctggccatggcgataccatttgcgcactaatttaccaccaacgagccattggcgccatcgctaggggccgtgtagccactggtggtgggctgctggtggccaaggcgagaatcgggaccgaggccttctgcacggttgcaggctgcgtggggtggctcagcggatgtggctggccatggcgataccatttgcgctctaatttaccaccaacgagccattggcgccatcgctagaggccgtgtagccactggtggtgggctgctggtggccaaggcgagaatcgggaccgaggccttctgcacggttgcaggccgcgtggggtggctcagcggatgtggctggccatggcgataccatttgcgcactaatttaccaccaacgagccattggcgccatcgctagaggccgtgtagccactggtggtgggctgctggtgggcaaggcgagaatcgggaccgaggcctcctgcacggttgcaggccgcgtggggtggctcagcggatgtggctggccatggcgataccatttgcgcactaatttaccaccaacgagccattggcgccatcgctagaggccgtgtagccactggtggtgggctgctggtgggcaaggcgagaatcgggaccgaggcctcctgcacggttgcaggctgcgtggggtggctcagcggatgtggctggccatggcgataccatttgcgctctaatttaccaccaacgagccattggcgccatcgctagaggccgtgtagccactggtggtgggctgctggtggccaaggcgagaatcgggaccgaggccttctgcacggttgcaggccgcgtggggtggctcagcggatgtggctggccatggcgataccatttgcgcactaatttaccaccaacgagccattggcgccatcgctaggggccgtgtagccacaggtggtgggctgctggtgggcaaggcgagaatcgggaccgaggccttctgcacggttgcaggctgcgtggggtggctcagcggatgtggctggccatggcgataccatttgcgctctaatttaccaccaacgagccattggcgccatcgctagaggccgtgtagccactggtggtgggctgctggtggccaaggcgagaatcgggaccgaggccttctgcacggttgcaggctgcgtggggtggctcagcggatgtggctggccatggcgataccatttgcgcactaatttaccacgaacgagccattggcgccatcgctaggggccgtgtagccactggtggtgggctgctggtggccaaggcgagaatcgggaccgaggccttctgcacggttgcaggccgcgtggggtggctcagcggatgtggctggccatggcgataccatttgcgctctaattgaccgacaacgagccattggcgccatcgctaggggccgtgtagccactggtggtgggctgctggtgggcaaggcgagaatcgggaccgaggccttctgcacggttgcaggctgcgtggggtggctcagcggatgtggctggccatggcgataccatttgcgcactaattgaccgacaacgagccattggcgccatcgctaggggccgtgtagccactggtggtgggctgctggtgggcaaggcgagaatcgggaccgaggccttctgcacggttgcaggccgcgtggggtggctcagcggatgtggctggccatggcgataccatttgcgcactaatttaccaccaacgagccattggcgccatcgctagaggccgtgtagccactggtggtgggctgctggtggccaaggcgagaatcgggaccgaggccttctgcacggttgcaggccgcgtggggtggctcagcggatgtggctggccatggcgataccatttgcgcactaatttaccaccaacgagccattggcgccatcgctagaggccgtgtagccactggtggtgggctgctggtggccaaggcgagaatcgggaccgaggccttctgcacggttgcaggctgcgtggggtggctcagcggatgtggctggccatggcgataccatttgccctctaatttaccaccaacgagccattggcgccatcgctaggggccgtgtagccactggtggtgggctgctggtggccaaggcgagaatcgggaccgaggccttctgcacggttgcaggccgcgtggggtggctcagcggatgtggctggccatggcgataccatttgcgctctaatttaccacgaacgagccattggcgccatcgctagaggccgtgtagccactgctggtgggctgctggtggccaaggcaagaatcgggaccgaggccttctgcacggttgcaggctgcgtggggtggctcagcggatgtggctggccatggcgataccatttgcgcactaattgaccaacaacgagccattggcgccatcgctaggggccgtgtagccactggtggtgggctgctggtggccaaggcgagaatcgggaccgaggccttctgcacggttgcaggccgcgtggggtggctcagcggatgtggctggccatggcgataccatttgcgcactaattgaccaccaacgagccattggcgccatcgctaggggccgtgtagccactggtggtgggctgctggtggccaaggcgagaatcgggaccgaggccttctgcacggttgcaggctgcgtggggtggctcagcggatgtggctggccatggcgataccatttgcgctctaatttaccaccaacgagccattggcgccatcgctagaggccgtgtagccactggtggtgggctgctggtgggcaaggcgagaatcgggaccgaggccttctgcacggttgcaggctgcgtggggtggctcagcggatgtggctggccatggcgataccatttgcgctctaatttaccaccaacgagccattggcgccatcgctagaggccgtgtagccactggtggtgggctgctggtgggcaaggcgagaatcgggaccgaggccttctgcacggttgcaggctgcgtggggtggctcagcggatgtggctggccatggcgataccatttgcgctctaatttaccaccaacgagccattggcgccatcgctagaggccgtgtagccactggtggtgggctgctggtgggcaaggcgagaatcgggaccgaggccttctgcacggttgcaggccgcgtggggtggctcagcggatgtggctggccatggcgataccatttgcgctctaatttaccaccaacgagccattggcgccatcgctagaggccgtgtagccactggtggtgggctgctggtgggcaaggcgagaatcgggaccgaggccttctgcacggttgcaggccgcgtggggtggctcagcggatgtggctggccatggcgataccatttgcgctctaatttaccaccaacgagccaatggcgccatcgctaggggccgtgtagccactggtggtgggctgctggtggccaaggcgagaatcgggaccgaggccttctgcacggttgcaggctgcgtggggtggctcagcggatgtggctggccatggcgataccatttgcgctctaatttaccaccaacgagccattggcgccatcgctagaggccgtgtagccactggtggtgggctgctggtgggcaaggcgagaatcgggaccgaggccttctgcacggttgcaggctgcgtggggtggctcagcggatgtggctggccatggcgataccatttgcgctctaatttaccaccaacgagccaatggcgccatcgctaggggccgtgtagccactggtggtgggctgctggtgggcaaggcgagaatcgggaccgaggccttctgcacggttgcaggctgcgtggggtggctcagcggatgtggctggccatggcgataccatttgcgctctaatttaccaccaacgagccattggcgccatcgctagaggccgtgtagccactggtggtgggctgctggtgggcaaggcgagaatcgggaccgaggccttctgcacggttgcaggctgcgtggggtggctcagcggatgtggctggccatggcgataccatttgcgctctaatttaccaccaacgagccattggcgccatcgctagaggccgtgtagccactggtggtgggctgctggtgggcaaggcgagaatcgggaccgaggccttctgcacggttgcaggctgcgtggggtggctcagcggatgtggctggccatggcgataccatttgcgctctaatttaccaccaacgagccattggcgccatcgctaggggccgtgtagccactggtggtgggctgctggtgggcaaggcgagaatcgggaccgaggccttctgcacggttgcaggctgcgtggggtggctcagcggatgtggctggccatggcgataccatttgcgcactaatttaccaccaacgagccaatggcgccatcgctaggggccgtgtagccactggtggtgggctgctggtgggcaaggcgagaatcgggaccgaggccttctgcacggttgcaggctgcgtggggtggctcagcggatgtggctggccatggcgataccatttgcgcactaatttaccaccaacgagccattggcgccatcgctagaggccgtgtagccactggtggtgggctgctggtggccaaggcgagaatcgggaccgaggccttctgcacggttgcaggctgcgtggggtggctcagcggatgtggctggccatggcgataccatttgcgcactaattgaccaccaacgagccattggcgccatcgctaggggccgtgtagccactggtggtgggctgctggtgggcaaggcgagaatcgggaccgaggccttctgcacggttgcaggctgcgtggggtggctcagcggatgtggctggccatggcgataccatttgcgctctaatttaccaccaacgagccattggcgccatcgctagaggccgtgtagccactggtggtgggctgctggtgggcaaggcgagaatcgggaccgaggccttctgcacggttgcaggctgcgtggggtggctcagcggatgtggctggccatggcgataccatttgcgctctaattgaccgccaacgagccattggcgccatcgctaggggccgtgtagccacaggtggtgggctgctggtgggcaaggcgagaatcgggaccgaggccttctgcacggttgcaggctgcgtggggtggctcagcggatgtggctggccatggcgataccatttgcgcactaattgaccaccaacgagccattggcgccatcgctagaggccgtgtagccactggtggtgggctgctggtggccaaggcgagaatcgggaccgaggccttctgcacggttgcaggctgcgtggggtggctcagcggatgtggctggccatggcgataccatttgcgctctaatttaccaccaacgagccattggcgccatcgctagaggccgtgtagccactggtggtgggctgctggtggccaaggcgagaatcgggaccgaggccttctgcacggttgcaggctgcgtggggtggctcagcggatgtggctggccatggcgataccatttgcgctctaatttaccaccaacgagccattggcgccatcgctagaggccgtgtagccactggtggtgggctgctggtggccaaggcgagaatcgggaccgaggccttctgcacggttgcaggctgcgtggggtggctcagcggatgtggctggccatggcgataccatttgcgctctaatttaccaccaacgagccattggcgccatcgctagaggccgtgtagccactggtggtgggctgctggtggccaaggcgagaatcgggaccgaggcctcctgcacggttgcaggctgcgtggggtggctcagcggatgtggctggccatggcgataccatttgcgctctaatttaccaccaacgagccattggcgccatcgctagaggccgtgtagccactggtggtgggctgctggtggccaaggcgagaatcgggaccgaggccttctgcacggttgcaggccgcgtggggtggctcagcggatgtggctggccatggcgataccatttgcgcactaatttaccaccaacgagccattggcgccatcgctagaggccgtgtagccactggtggtgggctgctggtgggcaaggcgagaatcgggaccgaggcctcctgcacggttgcaggccgcgtggggtggctcagcggatgtggctggccatggcgataccatttgcgcactaatttaccaccaacgagccattggcgccatcgctagaggccgtgtagccactggtggtgggctgctggtgggcaaggcgagaatcgggaccgaggcctcctgcacggttgcaggctgcgtggggtggctcagcggatgtggctggccatggcgataccatttgcgctctaatttaccaccaacgagccattggcgccatcgctagaggccgtgtagccactggtggtgggctgctggtggccaaggcgagaatcgggaccgaggccttctgcacggttgcaggccgcgtggggtggctcagcggatgtggctggccatggcgataccatttgcgcactaatttaccaccaacgagccattggcgccatcgctaggggccgtgtagccacaggtggtgggctgctggtgggcaaggcgagaatcgggaccgaggccttctgcacggttgcaggctgcgtggggtggctcagcggatgtggctggccatggcgataccatttgcgcactaattgaccgacaacgagccattggcgccatcgctaagggccgtgtagccactggtggtgggctgctggtggccaaggcgagaatcgggaccgaggccttctgcacggttgcaggctgcgtggggtggctcagcggatgtggctggccatggcgataccatttgcgctctaatttaccaccaacgagccattggcgccatcgctagaggccgtgtagccactggtggtgggctgctggtggccaaggcgagaatcgggaccgaggccttctgcacggttgcaggccgcgtggggtggctcagcggatgtggctggccatggcgataccatttgcgctctaatttaccaccaacgagccattggcgccatcgctagaggccgtgtagccactggtggtgggctgctggtgggcaaggcgagaatcgggaccgaggccttctgcacggttgcaggctgcgtggggtggctcagcggatgtggctggccatggcgataccatttgcgctctaatttaccaccaacgagccattggcgccatcgctagaggccgtgtagccactggtggtgggctgctggtgggcaaggcgagaatcgggaccgaggccttctgcacggttgcaggccgcgtggggtggctcagcggatgtggctggccatggcgataccatttgcgcactaatttaccaccaacgagccattggcgccatcgctagaggccgtgtagccactggtggtgggctgctggtgggcaaggcgagaatcgggaccgaggcctcctgcacggttgcaggctgcgtggggtggctcagcggatgtggctggccatggcgataccatttgcgctctaattgaccgacaacgagccattggcgccatcgctagaggccgtgtagccactgctggtgggctgctggtggccaaggcgagaatcgggaccgaggccttctgcacggttgcaggctgcgtggggtggctcagcggacgtggctggccatggcgataccatttgcgctctaatttaccaccaacgagccattggcgccatcgctagaggccgtgtagccactggtggtgggctgctggtggccaaggcgagaatcgggaccgaggccttctgcacggttgcaggctgcgtggggtggctcagcggatgtggctggccatggcgataccatttgcgctctaattgaccgacaacgagccattggcgccatcgctagaggccgtgtagccactggtggtgggctgctggtggccaaggcgagaatcgggaccgaggccttctgcacggttgcaggctgcgtggggtggctcagcggacgtggctggccatggcgataccatttgcgctctaatttaccaccaacgagccattggcgccatcgctagaggccgtgtagccactggtggtgggctgctggtggccaaggcgagaatcgggaccgaggccttctgcacggttgcaggctgcgtggggtggctcagcggacgtggctggccatggcgataccatttgcgctctaattgaccgacaacgagccattggcgccatcgctagaggccgtgtagccactggtggtgggctgctggtggccaaggcgagaatcgggaccgaggccttctgcacggttgcaggccgcgtggggtggctcagcggatgtggctggccatggcgataccatttgcgcactaatttaccaccaacgagccattggcgccatcgctagaggccgtgtagccactggtggtgggctgctggtggccaaggcgagaatcgggaccgaggccttctgcacggttgcaggctgcgtggggtggctcagcggatgtggctggccatggcgataccatttgcgctctaattgaccgacaacgagccattggcgccatcgctagaggccgtgtagccactggtggtgggctgctggtggccaaggcgagaatcgggaccgaggccttctgcacggttgcaggctgcgtggggtggctcagcggatgtggctggccatggcgataccatttgcgctctaatttaccaccaacgagccattggcgccatcgctagaggccgtgtagccactggtggtgggctgctggtggccaaggcgagaatcgggaccgaggccttctgcacggttgcaggctgcgtggggtggctcagcggatgtggctggccatggcgataccatttgcgctctaatttaccaccaacgagccattggcgccatcgctaggggccgtgtagccactggtggtgggctgctggtggccaaggcgagaatcgggaccgaggccttctgcacggttgcaggctgcgtggggtggctcagcggatgtggctggccatggcgataccatttgcgcactaatttaccaccaacgagccattggcgccatcgctagaggccgtgtagccactggtggtgggctgctggtggccaaggcgagaatcgggaccgaggccttctgcacggttgcaggctgcgtggggtggctcagcggatgtggttggccatggcgataccatttgcgctctaatttaccaccaacgagccattggcgccatcgctagaggccgtgtagccactggtggtgggctgctggtgggcaaggcgagaatcgggaccgaggccttctgcacggttgcaggccgcgtggggtggctcagcggaagtggctggccatggcgataccatttgtgctctaattgaccgacaacgagccattggcgccatcactagaggccgtgtagccacaggtggtgggctgctggtgggcaaggcgagaatcgggaccgaggccttctgcacggttgcaggctgcgtggggtggctcagcggaagtggctggccatggcgataccatttgtgctctaattgaccgacaacgagccattggcgccatcgctagaggccgtgtagccactggtggtgggctgctggtgggcaaggcgagaatcgggaccgaggccttctgcacggttgcaggctgcgtggggtggctcagcggatgtggctggccatggcgataccatttgcgctctaattgaccgccaacgagccattggcgccatcgctagaggccgtgtagccactggtggtgggctgctggtgggcaaggcgagaatcgggaccgaggccttctgcacggttgcaggccgcgtggggtggctcagcggatgtggctggccatggcgataccatttgcgcactaatttaccaccaacgagccaatggcgccatcgctagaggccgtgtagccactggtggtgggctgctggtgggcaaggcgagaatcgggaccgaggccttctgcacggttgcaggctgcgtggggtggctcagcggatgtggctggccatggcgataccatttgcgcactaatttaccaccaacgagccaatggcgccatcgctaggggccgtgtagccactggtggtgggctgctggtgggcaaggcgagaatcgggaccgaggccttctgcacggttgcaggctgcgtggggtggctcagcggatgtggatggccatggcgataccatttgcgcactaatttaccaccaacgagccattggcgccatcgctagaggccgtgtagccactggtggtgggctgctggtgggcaaggcgagaatcgggaccgaggccttctgcacggttgcaggctgcgtggggtggctcagcggatgtggctggccatggcgataccatttgcgctctaatttaccaccaacgagccattggcgccatcgctagaggccgtgtagccactggtggtgggctgctggtgggcaggcgagaatcgggaccgaggccttttgcacggttgcaggccgcgtggggtggctcagcggatgtggctggccatggcgataccatttgcgctctaatttaccaccaacgagccaatggcgccatcgctaggggccgtgtagccactggtggtgggctgctggtggccaaggcgagaatcgggaccgaggccttctgcacggttgcaggctgcgtggggtggctcagcggatgtggctggccatggcgataccatttgcgcactaattgaccgacaacgagccattggcgccatcgctaggggccgtgtagccactggtggtgggctgctggtgggcaaggcgagaatcgggaccgaggccttctgcacggttgcaggccgcgtggggtggctcagcggatgtggctggccatggcgataccatttgcgcactaatttaccacgaacgagccattggcgccatcgctaggggccgtgtagccactggtggtgggctgctggtggccaaggcgagaatcgggaccgaggccttctgcacggttgcaggccgcgtggggtggctcagcggatgtggctggccatggcgataccatttgcgcattaatttaccaccaacgagccattggcgccatcgctagaggccgtgtagccactgctggtgggctgctggtggccaaggcgagaatcgggaccgaggccttctgcacggttgcaggccgcgtggggtggctcagcggatgtggctggccatggcgataccatttgcgctctaatttaccacgaacgagccattggcgccatcgctagaggccgtgtagccactgctggtgggctgctggtggccaaggcaagaatcgggaccgaggccttctgcacggttgcaggctgcgtggggtggctcagcggatgtggctggccatggcgataccatttgcgcactaattgaccgacaacgagccattggcgccatcgctaggggccgtgtagccactggtggtgggctgctggtgggcaaggcgagaatcgggaccgaggccttctgcacggttgcaggccgcgtggggtggctcagcggatgtggctggccatggcgataccattgcgcactnnnnnnnnnnnnnnnnnnnnnnnnnnnnnnnnnnnnnnnnnnnnnnnnnnnnnnnnnnnnnnnnnnnnnnnnnnnnnnnnnnnnnnnnnnnnnnnnnnnnnnnnnnnnnnnnnnnnnnnnnnnnnnnnnnnnnnnnnnnnnnnnnnnnnnnnnnnnnnnnnnnnnnnnnnnnnnnnnnnnnnnnnnnnnnnnnnnnnnnnnnnnnnnnnnnnnnnnnnnnnnnnnnnnnnnnnnnnnnnnnnnnnnnnnnnnnnnnnnnnnnnnnnnnnnnnnnnnnnnnnnnnnnnnnnnnnnnnnnnnnnnnnnnnnnnnnnnnnnnnnnnnnnnnnnnnnnnnnnnnnnnnnnnnnnnnnnnnnnnnnnnnnnnnnnnnnnnnnnnnnnnnnnnnnnnnnnnnnnnnnnnnnnnnnnnnnnnnnnnnnnnnnnnnnnnnnnnnnnnnnnnnnnnnnnnnnnnnnnnnnnnnnnnnnnnnnnnnnnnnnnnnnnnnnnnnnnnnnnnnnnnnnnnnnnnnnnnnnnnnnnnnnnnnnnnnnnnnnnnnnnnnnnnnnnnnnnnnnnnnnnnnnnnnnnnnnnnnnnnnnnnnnnnnnnnnnnnnnnnnnnnnnnnnnnnnnnnnnnnnnnnnnnnnnnnnnnnnnnnnnnnnnnnnnnnnnnnnnnnnnnnnnnnnnnnnnnnnnnnnnnnnnnnnnnnnnnnnnnnnnnnnnnnnnnnnnnnnnnnnnnnnnnnnnnnnnnnnnnnnnnnnnnnnnnnnnnnnnnnnnnnnnnnnnnnnnnnnnnnnnnnnnnnnnnnnnnnnnnnnnnnnnnnnnnnnnnnnnnnnnnnnnnnnnnnnnnnnnnnnnnnnnnnnnnnnnnnnnnnnnnnnnnnnnnnnnnnnnnnnnnnnnnnnnnnnnnnnnnnnnnnnnnnnnnnnnnnnnnnnnnnnnnnnnnnnnnnnnnnnnnnnnnnnnnnnnnnnnnnnnnnnnnnnnnnnnnnnnnnnnnnnnnnnnnnnnnnnnnnnnnnnnnnnnnnnnnnnnnnnnnnnnnnnnnnnnnnnnnnnnnnnnnnnnnnnnnnnnnnnnnnnnnnnnnnnnnnnnnnnnnnnnnnnnnnnnnnnnnnnnnnnnnnnnnnnnnnnnnnnnnnnnnnnnnnnnnnnnnnnnnnnnnnnnnnnnnnnnnnnnnnnnnnnnnnnnnnnnnnnnnnnnnnnnnnnnnnnnnnnnnnnnnnnnnnnnnnnnnnnnnnnnnnnnnnnnnnnnnnnnnnnnnnnnnnnnnnnnnnnnnnnnnnnnnnnnnnnnnnnnnnnnnnnnnnnnnnnnnnnnnnnnnnnnnnnnnnnnnnnnnnnnnnnnnnnnnnnnnnnnnnnnnnnnnnnnnnnnnnnnnnnnnnnnnnnnnnnnnnnnnnnnnnnnnnnnnnnnnnnnnnnnnnnnnnnnnnnnnnnnnnnnnnnnnnnnnnnnnnnnnnnnnnnnnnnnnnnnnnnnnnnnnnnnnnnnnnnnnnnnnnnnnnnnnnnnnnnnnnnnnnnnnnnnnnnnnnnnnnnnnnnnnnnnnnnnnnnnnnnnnnnnnnnnnnnnnnnnnnnnnnnnnnnnnnnnnnnnnnnnnnnnnnnnnnnnnnnnnnnnnnnnnnnnnnnnnnnnnnnnnnnnnnnnnnnnnnnnnnnnnnnnnnnnnnnnnnnnnnnnnnnnnnnnnnnnnnnnnnnnnnnnnnnnnnnnnnnnnnnnnnnnnnnnnnnnnnnnnnnnnnnnnnnnnnnnnnnnnnnnnnnnnnnnnnnnnnnnnnnnnnnnnnnnnnnnnnnnnnnnnnnnnnnnnnnnnnnnnnnnnnnnnnnnnnnnnnnnnnnnnnnnnnnnnnnnnnnnnnnnnnnnnnnnnnnnnnnnnnnnnnnnnnnnnnnnnnnnnnnnnnnnnnnnnnnnnnnnnnnnnnnnnnnnnnnnnnnnnnnnnnnnnnnnnnnnnnnnnnnnnnnnnnnnnnnnnnnnnnnnnnnnnnnnnnnnnnnnnnnnnnnnnnnnnnnnnnnnnnnnnnnnnnnnnnnnnnnnnnnnnnnnnnnnnnnnnnnnnnnnnnnnnnnnnnnnnnnnnnnnnnnnnnnnnnnnnnnnnnnnnnnnnnnnnnnnnnnnnnnnnnnnnnnnnnnnnnnnnnnnnnnnnnnnnnnnnnnnnnnnnnnnnnnnnnnnnnnnnnnnnnnnnnnnnnnnnnnnnnnnnnnnnnnnnnnnnnnnnnnnnnnnnnnnnnnnnnnnnnnnnnnnnnnnnnnnnnnnnnnnnnnnnnnnnnnnnnnnnnnnnnnnnnnnnnnnnnnnnnnnnnnnnnnnnnnnnnnnnnnnnnnnnnnnnnnnnnnnnnnnnnnnnnnnnnnnnnnnnnnnnnnnnnnnnnnnnnnnnnnnnnnnnnnnnnnnnnnnnnnnnnnnnnnnnnnnnnnnnnnnnnnnnnnnnnnnnnnnnnnnnnnnnnnnnnnnnnnnnnnnnnnnnnnnnnnnnnnnnnnnnnnnnnnnnnnnnnnnnnnnnnnnnnnnnnnnnnnnnnnnnnnnnnnnnnnnnnnnnnnnnnnnnnnnnnnnnnnnnnnnnnnnnnnnnnnnnnnnnnnnnnnnnnnnnnnnnnnnnnnnnnnnnnnnnnnnnnnnnnnnnnnnnnnnnnnnnnnnnnnnnnnnnnnnnnnnnnnnnnnnnnnnnnnnnnnnnnnnnnnnnnnnnnnnnnnnnnnnnnnnnnnnnnnnnnnnnnnnnnnnnnnnnnnnnnnnnnnnnnnnnnnnnnnnnnnnnnnnnnnnnnnnnnnnnnnnnnnnnnnnnnnnnnnnnnnnnnnnnnnnnnnnnnnnnnnnnnnnnnnnnnnnnnnnnnnnnnnnnnnnnnnnnnnnnnnnnnnnnnnnnnnnnnnnnnnnnnnnnnnnnnnnnnnnnnnnnnnnnnnnnnnnnnnnnnnnnnnnnnnnnnnnnnnnnnnnnnnnnnnnnnnnnnnnnnnnnnnnnnnnnnnnnnnnnnnnnnnnnnnnnnnnnnnnnnnnnnnnnnnnnnnnnnnnnnnnnnnnnnnnnnnnnnnnnnnnnnnnnnnnnnnnnnnnnnnnnnnnnnnnnnnnnnnnnnnnnnnnnnnnnnnnnnnnnnnnnnnnnnnnnnnnnnnnnnnnnnnnnnnnnnnnnnnnnnnnnnnnnnnnnnnnnnnnnnnnnnnnnnnnnnnnnnnnnnnnnnnnnnnnnnnnnnnnnnnnnnnnnnnnnnnnnnnnnnnnnnnnnnnnnnnnnnnnnnnnnnnnnnnnnnnnnnnnnnnnnnnnnnnnnnnnnnnnnnnnnnnnnnnnnnnnnnnnnnnnnnnnnnnnnnnnnnnnnnnnnnnnnnnnnnnnnnnnnnnnnnnnnnnnnnnnnnnnnnnnnnnnnnnnnnnnnnnnnnnnnnnnnnnnnnnnnnnnnnnnnnnnnnnnnnnnnnnnnnnnnnnnnnnnnnnnnnnnnnnnnnnnnnnnnnnnnnnnnnnnnnnnnnnnnnnnnnnnnnnnnnnnnnnnnnnnnnnnnnnnnnnnnnnnnnnnnnnnnnnnnnnnnnnnnnnnnnnnnnnnnnnnnnnnnnnnnnnnnnnnnnnnnnnnnnnnnnnnnnnnnnnnnnnnnnnnnnnnnnnnnnnnnnnnnnnnnnnnnnnnnnnnnnnnnnnnnnnnnnnnnnnnnnnnnnnnnnnnnnnnnnnnnnnnnnnnnnnnnnnnnnnnnnnnnnnnnnnnnnnnnnnnnnnnnnnnnnnnnnnnnnnnnnnnnnnnnnnnnnnnnnnnnnnnnnnnnnnnnnnnnnnnnnnnnnnnnnnnnnnnnnnnnnnnnnnnnnnnnnnnnnnnnnnnnnnnnnnnnnnnnnnnnnncgtttgcgctctaatttaccgccaacgagccattggcgccatcgctaggggccgtatagccactggtggtgggctgctggtgggcaaggcgagaatcgggaccgaggccttctgcacggttgcaggctgcgtggggtggctcagcggatgtggctggccatggcgataccatttgcgcgctaatttaccaccaacgagccattggcgccatcgctagaggccgtgtagccactggtggtgggctgctggtggccaaggcgagaatcgggaccgaggccttctgcacggttgcaggctgcgtggggtggctcagcggatgtggctggccatggcgataccatttgcgctctaatttaccaccaacgagccattggcgccatcgctagaggccgtgtagccactggtggtgggctgctggtggccaaggcgagaatcgggaccgaggccttctgcacggttgcaggctgcgtggggtggctcagcggatgtggctggccatggcgataccatttgcgctctaatttaccaccaacgagccattggcgccatcgctagaggccgtgtagccactggtggtgggctgctggtggccaaggcgagaatcgggaccgaggccttctgcacggttgcaggctgcgtggggtggctcagcggatgtggctggccatggcgataccatttgcgctctaatttaccaccaacgagccattggcgccatcgctaggggccgtgtagccactggtggtgggctgctggtggccaaggcgagaatcgggaccgaggccttctgcacggttgcaggctgcgtggggtggctcagcggatgtggttggccatggcgataccatttgcgctctaatttaccacgaacgagccattggcgccatcgctagaggccgtgtagccactgctggtgggctgctggtggccaaggcaagaatcgggaccgaggccttctgcacggttgcaggctgcgtggggtggctcagcggatgtggctggccatggcgataccatttgcgcactaattgaccgacaacgagccattggcgccatcgctaggggccgtgtagccactggtggtgggctgctggtgggcaaggcgagaatcgggaccgaggccttctgcacggttgcaggccgcgtggggtggctcagcggatgtggctggccatggcgataccatttgcgcactaatttaccaccaacgagccattggcgccatcgctaggggccgtgtagccactggtggtgggctgctggtggccaaggcgagaatcgggaccgaggccttctgcacggttgcaggccgcgtggggtggctcagcggatgtggctggccatggcgataccatttgcgcactaatttaccaccaacgagccaatggcgccatcgctagaggccgtgtagccactggtggtgggctgctggtgggcaaggcgagaatcgggaccgaggccttctgcacggttgcaggctgcgtggggtggctcagcggatgtggctggccatggcgataccatttgcgcactaatttaccaccaacgagccattggcgccatcgctagaggccgtgtagccactggtggtgggctgctggtgggcaaggcgagaatcgggaccgaggccttctgcacggttgcaggctgcgtggggtggctcagcggatgtggctggccatggcgataccatttgcgctctaatttaccaccaacgagccattggcgccatcgctagaggccgtgtagccactggtggtgggctgctggtgggcaaggcgagaatcgggaccgaggccttctgcacggttgcaggccgcgtggggtggctcagcggatgtggctggccatggcgataccatttgcgctctaatttaccaccaacgagccattggcgccatcgctagaggccgtgtagccactggtggtgggctgctggtgggcaaggcgagaatcgggaccgaggccttctgcacggttgcaggctgcgtggggtggctcagcggatgtggctggccatggcgataccatttgcgctctaatttaccaccaacgagccattggcgccatcgctagaggccgtgtagccactggtggtgggctgctggtgggcaaggcgagaatcgggaccgaggccttctgcacggttgcaggctgcgtggggtggctcagcggatgtggctggccatggcgataccatttgcgctctaatttaccaccaacgagccattggcgccatcgctaggggccgtgtagccactggtggtgggctgctggtggccaaggcgagaatcgggaccgaggccttctgcacggttgcaggctgcgtggggtggctcagcggatgtggctggccatggcgataccatttgcgctctaatttaccaccaacgagccattggcgccatcgctagaggccgtgtagccactggtggtgggctgctggtgggcaaggcgagaatcgggaccgaggccttctgcacggttgcaggccgcgtggggtggctcagcggatgtggctggccatggcgataccatttgcgcactaatttaccaccaacgagccaatggcgccatcactaggggccgnnnnnnnnnnnnnnnnnnnnnnnnnnnnnnnnnnnnnnnnnnnnnnnnnnnnnnnnnnnnnnnnnnnnnnnnnnnnnnnnnnnnnnnnnnnnnnnnnnnnnnnnnnnnnnnnnnnnnnnnnnnnnnnnnnnnnnnnnnnnnnnnnnnnnnnnnnnnnnnnnnnnnnnnnnnnnnnnnnnnnnnnnnnnnnnnnnnnnnnnnnnnnnnnnnnnnnnnnnnnnnnnnnnnnnnnnnnnnnnnnnnnnnnnnnnnnnnnnnnnnnnnnnnnnnnnnnnnnnnnnnnnnnnnnnnnnnnnnnnnnnnnnnnnnnnnnnnnnnnnnnnnnnnnnnnnnnnnnnnnnnnnnnnnnnnnnnnnnnnnnnnnnnnnnnnnnnnnnnnnnnnnnnnnnnnnnnnnnnnnnnnnnnnnnnnnnnnnnnnnnnnnnnnnnnnnnnnnnnnnnnnnnnnnnnnnnnnnnnnnnnnnnnnnnnnnnnnnnnnnnnnnnnnnnnnnnnnnnnnnnnnnnnnnnnnnnnnnnnnnnnnnnnnnnnnnnnnnnnnnnnnnnnnnnnnnnnnnnnnnnnnnnnnnnnnnnnnnnnnnnnnnnnnnnnnnnnnnnnnnnnnnnnnnnnnnnnnnnnnnnnnnnnnnnnnnnnnnnnnnnnnnnnnnnnnnnnnnnnnnnnnnnnnnnnnnnnnnnnnnnnnnnnnnnnnnnnnnnnnnnnnnnnnnnnnnnnnnnnnnnnnnnnnnnnnnnnnnnnnnnnnnnnnnnnnnnnnnnnnnnnnnnnnnnnnnnnnnnnnnnnnnnnnnnnnnnnnnnnnnnnnnnnnnnnnnnnnnnnnnnnnnnnnnnnnnnnnnnnnnnnnnnnnnnnnnnnnnnnnnnnnnnnnnnnnnnnnnnnnnnnnnnnnnnnnnnnnnnnnnnnnnnnnnnnnnnnnnnnnnnnnnnnnnnnnnnnnnnnnnnnnnnnnnnnnnnnnnnnnnnnnnnnnnnnnnnnnnnnnnnnnnnnnnnnnnnnnnnnnnnnnnnnnnnnnnnnnnnnnnnnnnnnnnnnnnnnnnnnnnnnnnnnnnnnnnnnnnnnnnnnnnnnnnnnnnnnnnnnnnnnnnnnnnnnnnnnnnnnnnnnnnnnnnnnnnnnnnnnnnnnnnnnnnnnnnnnnnnnnnnnnnnnnnnnnnnnnnnnnnnnnnnnnnnnnnnnnnnnnnnnnnnnnnnnnnnnnnnnnnnnnnnnnnnnnnnnnnnnnnnnnnnnnnnnnnnnnnnnnnnnnnnnnnnnnnnnnnnnnnnnnnnnnnnnnnnnnnnnnnnnnnnnnnnnnnnnnnnnnnnnnnnnnnnnnnnnnnnnnnnnnnnnnnnnnnnnnnnnnnnnnnnnnnnnnnnnnnnnnnnnnnnnnnnnnnnnnnnnnnnnnnnnnnnnnnnnnnnnnnnnnnnnnnnnnnnnnnnnnnnnnnnnnnnnnnnnnnnnnnnnnnnnnnnnnnnnnnnnnnnnnnnnnnnnnnnnnnnnnnnnnnnnnnnnnnnnnnnnnnnnnnnnnnnnnnnnnnnnnnnnnnnnnnnnnnnnnnnnnnnnnnnnnnnnnnnnnnnnnnnnnnnnnnnnnnnnnnnnnnnnnnnnnnnnnnnnnnnnnnnnnnnnnnnnnnnnnnnnnnnnnnnnnnnnnnnnnnnnnnnnnnnnnnnnnnnnnnnnnnnnnnnnnnnnnnnnnnnnnnnnnnnnnnnnnnnnnnnnnnnnnnnnnnnnnnnnnnnnnnnnnnnnnnnnnnnnnnnnnnnnnnnnnnnnnnnnnnnnnnnnnnnnnnnnnnnnnnnnnnnnnnnnnnnnnnnnnnnnnnnnnnnnnnnnnnnnnnnnnnnnnnnnnnnnnnnnnnnnnnnnnnnnnnnnnnnnnnnnnnnnnnnnnnnnnnnnnnnnnnnnnnnnnnnnnnnnnnnnnnnnnnnnnnnnnnnnnnnnnnnnnnnnnnnnnnnnnnnnnnnnnnnnnnnnnnnnnnnnnnnnnnnnnnnnnnnnnnnnnnnnnnnnnnnnnnnnnnnnnnnnnnnnnnnnnnnnnnnnnnnnnnnnnnnnnnnnnnnnnnnnnnnnnnnnnnnnnnnnnnnnnnnnnnnnnnnnnnnnnnnnnnnnnnnnnnnnnnnnnnnnnnnnnnnnnnnnnnnnnnnnnnnnnnnnnnnnnnnnnnnnnnnnnnnnnnnnnnnnnnnnnnnnnnnnnnnnnnnnnnnnnnnnnnnnnnnnnnnnnnnnnnnnnnnnnnnnnnnnnnnnnnnnnnnnnnnnnnnnnnnnnnnnnnnnnnnnnnnnnnnnnnnnnnnnnnnnnnnnnnnnnnnnnnnnnnnnnnnnnnnnnnnnnnnnnnnnnnnnnnnnnnnnnnnnnnnnnnnnnnnnnnnnnnnnnnnnnnnnnnnnnnnnnnnnnnnnnnnnnnnnnnnnnnnnnnnnnnnnnnnnnnnnnnnnnnnnnnnnnnnnnnnnnnnnnnnnnnnnnnnnnnnnnnnnnnnnnnnnnnnnnnnnnnnnnnnnnnnnnnnnnnnnnnnnnnnnnnnnnnnnnnnnnnnnnnnnnnnnnnnnnnnnnnnnnnnnnnnnnnnnnnnnnnnnnnnnnnnnnnnnnnnnnnnnnnnnnnnnnnnnnnnnnnnnnnnnnnnnnnnnnnnnnnnnnnnnnnnnnnnnnnnnnnnnnnnnnnnnnnnnnnnnnnnnnnnnnnnnnnnnnnnnnnnnnnnnnnnnnnnnnnnnnnnnnnnnnnnnnnnnnnnnnnnnnnnnnnnnnnnnnnnnnnnnnnnnnnnnnnnnnnnnnnnnnnnnnnnnnnnnnnnnnnnnnnnnnnnnnnnnnnnnnnnnnnnnnnnnnnnnnnnnnnnnnnnnnnnnnnnnnnnnnnnnnnnnnnnnnnnnnnnnnnnnnnnnnnnnnnnnnnnnnnnnnnnnnnnnnnnnnnnnnnnnnnnnnnnnnnnnnnnnnnnnnnnnnnnnnnnnnnnnnnnnnnnnnnnnnnnnnnnnnnnnnnnnnnnnnnnnnnnnnnnnnnnnnnnnnnnnnnnnnnnnnnnnnnnnnnnnnnnnnnnnnnnnnnnnnnnnnnnnnnnnnnnnnnnnnnnnnnnnnnnnnnnnnnnnnnnnnnnnnnnnnnnnnnnnnnnnnnnnnnnnnnnnnnnnnnnnnnnnnnnnnnnnnnnnnnnnnnnnnnnnnnnnnnnnnnnnnnnnnnnnnnnnnnnnnnnnnnnnnnnnnnnnnnnnnnnnnnnnnnnnnnnnnnnnnnnnnnnnnnnnnnnnnnnnnnnnnnnnnnnnnnnnnnnnnnnnnnnnnnnnnnnnnnnnnnnnnnnnnnnnnnnnnnnnnnnnnnnnnnnnnnnnnnnnnnnnnnnnnnnnnnnnnnnnnnnnnnnnnnnnnnnnnnnnnnnnnnnnnnnnnnnnnnnnnnnnnnnnnnnnnnnnnnnnnnnnnnnnnnnnnnnnnnnnnnnnnnnnnnnnnnnnnnnnnnnnnnnnnnnnnnnnnnnnnnnnnnnnnnnnnnnnnnnnnnnnnnnnnnnnnnnnnnnnnnnnnnnnnnnnnnnnnnnnnnnnnnnnnnnnnnnnnnnnnnnnnnnnnnnnnnnnnnnnnnnnnnnnnnnnnnnnnnnnnnnnnnnnnnnnnnnnnnnnnnnnnnnnnnnnnnnnnnnnnnnnnnnnnnnnnnnnnnnnnnnnnnnnnnnnnnnnnnnnnnnnnnnnnnnnnnnnnnnnnnnnnnnnnnnnnnnnnnnnnnnnnnnnnnnnnnnnnnnnnnnnnnnnnnnnnnnnnnnnnnnnnnnnnnnnnnnnnnnnnnnnnnnnnnnnnnnnnnnnnnnnnnnnnnnnnnnnnnnnnnnnnnnnnnnnnnnnnnnnnnnnnnnnnnnnnnnnnnnnnnnnnnnnnnnnnnnnnnnnnnnnnnnnnnnnnnnnnnnnnnnnnnnnnnnnnnnnnnnnnnnnnnnnnnnnnnnnnnnnnnnnnnnnnnnnnnnnnnnnnnnnnnnnnnnnnnnnnnnnnnnnnnnnnnnnnnnnnnnnnnnnnnnnnnnnnnnnnnnnnnnnnnnnnnnnnnnnnnnnnnnnnnnnnnnnnnnnnnnnnnnnnnnnnnnnnnnnnnnnnnnnnnnnnnnnnnnnnnnnnnnnnnnnnnnnnnnnnnnnnnnnnnnnnnnnnnnnnnnnnnnnnnnnnnnnnnnnnnnnnnnnnnnnnnnnnnnnnnnnnnnnnnnnnnnnnnnnnnnnnnnnnnnnnnnnnnnnnnnnnnnnnnnnnnnnnnnnnnnnnnnnnnnnnnnnnnnnnnnnnnnnnnnnnnnnnnnnnnnnnnnnnnnnnnnnnnnnnnnnnnnnnnnnnnnnnnnnnnnnnnnnnnnaggatcccctaccaccaacgagccattggcgccatcgctagaggccgtgtagccactgctggtgggctgctggtggccaaggcgagaatcgggaccgaggccttctacacggttgcaggctgcgtggggtggctcagcggatgtggctggccatggcgataccatttgcgcactaatttaccacgaacgagccattggcgccatcgctagaggccgtgtagccactgctggtgggctgctggtggccaaggcgagaatcgggaccgaggccttctgcacggttgcaggctgcgtggggtggctcagcggatgtggctggccatggcgataccatttgcgcactaattgaccacgaacgagccattggcgccatcgctagaggccgtgtagccactgctggtgggctgctggtggccaaggcaagaatcgggaccgaggccttctgcacggttgcaggctgcgtggggtggctcagcggatgtggctggccatggcgataccatttgcgcactaatttaccaccaacgagccattggcgccatcgctaggggccgtgtagccactggtggtgggctgctggtgggcaaggcgagaatcgggaccgaggccttctgcacggttgcaggctgcgtggggtggctcagcggatgtggctggccatggcgataccatttgcgcactaatttaccaccaacgagccattggcgccatcgctagaggccgtgtagccactggtggtgggctgctggtggccaaggcgagaatcgggaccgaggccttctgcacggttgcaggctgcgtggggtggctcagcggatgtggctggccatggcgataccatttgcgctctaatttaccaccaacgagccattggcgccatcgctagaggccgtgtagccactggtggtgggctgctggtggccaaggcgagaatcgggaccgaggccttctgcacggttgcaggctccgtggggtggctcagcggatgtggctgggcatggcgataccatttgcgctctaatataccaccaacgagccattggcgccatcgctagaggccgtgtagccactggtggtgggctgctggtggccaaggcgagaatcgggaccgaggccttctgcacggttgcaggctgcgtggggtggctcagcggatgtggctggccatggcgataccatttgcgctctaatttaccaccaacgagccattggcgccatcgctagaggccgtgtagccactggtggtgggctgctggtggccaaggcgagaatcgggaccgaggccttctgcacggttgcaggctgcgtggggtggctcagcggatgtggctggccatggcgataccatttgcgctctaatttaccaccaacgagccattggcgccatcgctagaggccgtgtagccactggtggtgggctgctggtggccaaggcgagaatcgggaccgaggccttctgcacggttgcaggctgcgtggggtggctcagcggatgtggctggccatggcgataccatttgcgctctaatttaccaccaacgagccattggcgccatcgctaggggccgtgtagccactggtggtgggctgctggtgggcaaggcgagaatcgggaccgaggccttctgcacggttgcaggctgcgtggggtggctcagcggatgtggctggccatggcgataccatttgcgcactaatttaccaccaacgagccattggcgccatcgctagaggccgtgtagccactggtggtgggctgctggtggccaaggcgagaatcgggaccgaggccttctgcacggttgcaggctgcgtggggtggctcagcggatgtggctggccatggcgataccatttgcgcactaatttaccaccaacgagccattggcgccatcgctagaggccgtgtagccactggtggtgggctgctggtggccaaggcgagaatcgggaccgaggccttctgcacggttgcaggccgcgtggggtggctcagcggatgtggctggccatggcgataccatttgcgctctaatttaccaccaacgagccattggcgccatcgctagaggccgtgtagccactggtggtgggctgctggtggccaaggcgagaatcgggaccgaggccttctgcacggttgcaggccgcgtggggtggctcagcggatgtggctggccatggcgataccatttgcgcactaatttaccaccaacgagccattggcgccatcgctaggggccgtgtagccactggtggtgggctgctggtgggcaaggcgagaatcgggaccgaggccttctgcacggttgcaggccgcgtggggtggctcagcggatgtggctggccatggcgataccatttgcgcactaatttaccaccaacgagccattggcgccatcgctagaggccgtgtagccactggtggtgggctgnnnnnnnnnnnnnnnnnnnnnnnnnnnnnnnnnnnnnnnnnnnnnnnnnnnnnnnnnnnnnnnnnnnnnnnnnnnnnnnnnnnnnnnnnnnnnnnnnnnnnnnnnnnnnnnnnnnnnnnnnnnnnnnnnnnnnnnnnnnnnnnnnnnnnnnnnnnnnnnnnnnnnnnnnnnnnnnnnnnnnnnnnnnnnnnnnnnnnnnnnnnnnnnnnnnnnnnnnnnnnnnnnnnnnnnnnnnnnnnnnnnnnnnnnnnnnnnnnnnnnnnnnnnnnnnnnnnnnnnnnnnnnnnnnnnnnnnnnnnnnnnnnnnnnnnnnnnnnnnnnnnnnnnnnnnnnnnnnnnnnnnnnnnnnnnnnnnnnnnnnnnnnnnnnnnnnnnnnnnnnnnnnnnnnnnnnnnnnnnnnnnnnnnnnnnnnnnnnnnnnnnnnnnnnnnnnnnnnnnnnnnnnnnnnnnnnnnnnnnnnnnnnnnnnnnnnnnnnnnnnnnnnnnnnnnnnnnnnnnnnnnnnnnnnnnnnnnnnnnnnnnnnnnnnnnnnnnnnnnnnnnnnnnnnnnnnnnnnnnnnnnnnnnnnnnnnnnnnnnnnnnnnnnnnnnnnnnnnnnnnnnnnnnnnnnnnnnnnnnnnnnnnnnnnnnnnnnnnnnnnnnnnnnnnnnnnnnnnnnnnnnnnnnnnnnnnnnnnnnnnnnnnnnnnnnnnnnnnnnnnnnnnnnnnnnnnnnnnnnnnnnnnnnnnnnnnnnnnnnnnnnnnnnnnnnnnnnnnnnnnnnnnnnnnnnnnnnnnnnnnnnnnnnnnnnnnnnnnnnnnnnnnnnnnnnnnnnnnnnnnnnnnnnnnnnnnnnnnnnnnnnnnnnnnnnnnnnnnnnnnnnnnnnnnnnnnnnnnnnnnnnnnnnnnnnnnnnnnnnnnnnnnnnnnnnnnnnnnnnnnnnnnnnnnnnnnnnnnnnnnnnnnnnnnnnnnnnnnnnnnnnnnnnnnnnnnnnnnnnnnnnnnnnnnnnnnnnnnnnnnnnnnnnnnnnnnnnnnnnnnnnnnnnnnnnnnnnnnnnnnnnnnnnnnnnnnnnnnnnnnnnnnnnnnnnnnnnnnnnnnnnnnnnnnnnnnnnnnnnnnnnnnnnnnnnnnnnnnnnnnnnnnnnnnnnnnnnnnnnnnnnnnnnnnnnnnnnnnnnnnnnnnnnnnnnnnnnnnnnnnnnnnnnnnnnnnnnnnnnnnnnnnnnnnnnnnnnnnnnnnnnnnnnnnnnnnnnnnnnnnnnnnnnnnnnnnnnnnnnnnnnnnnnnnnnnnnnnnnnnnnnnnnnnnnnnnnnnnnnnnnnnnnnnnnnnnnnnnnnnnnnnnnnnnnnnnnnnnnnnnnnnnnnnnnnnnnnnnnnnnnnnnnnnnnnnnnnnnnnnnnnnnnnnnnnnnnnnnnnnnnnnnnnnnnnnnnnnnnnnnnnnnnnnnnnnnnnnnnnnnnnnnnnnnnnnnnnnnnnnnnnnnnnnnnnnnnnnnnnnnnnnnnnnnnnnnnnnnnnnnnnnnnnnnnnnnnnnnnnnnnnnnnnnnnnnnnnnnnnnnnnnnnnnnnnnnnnnnnnnnnnnnnnnnnnnnnnnnnnnnnnnnnnnnnnnnnnnnnnnnnnnnnnnnnnnnnnnnnnnnnnnnnnnnnnnnnnnnnnnnnnnnnnnnnnnnnnnnnnnnnnnnnnnnnnnnnnnnnnnnnnnnnnnnnnnnnnnnnnnnnnnnnnnnnnnnnnnnnnnnnnnnnnnnnnnnnnnnnnnnnnnnnnnnnnnnnnnnnnnnnnnnnnnnnnnnnnnnnnnnnnnnnnnnnnnnnnnnnnnnnnnnnnnnnnnnnnnnnnnnnnnnnnnnnnnnnnnnnnnnnnnnnnnnnnnnnnnnnnnnnnnnnnnnnnnnnnnnnnnnnnnnnnnnnnnnnnnnnnnnnnnnnnnnnnnnnnnnnnnnnnnnnnnnnnnnnnnnnnnnnnnnnnnnnnnnnnnnnnnnnnnnnnnnnnnnnnnnnnnnnnnnnnnnnnnnnnnnnnnnnnnnnnnnnnnnnnnnnnnnnnnnnnnnnnnnnnnnnnnnnnnnnnnnnnnnnnnnnnnnnnnnnnnnnnnnnnnnnnnnnnnnnnnnnnnnnnnnnnnnnnnnnnnnnnnnnnnnnnnnnnnnnnnnnnnnnnnnnnnnnnnnnnnnnnnnnnnnnnnnnnnnnnnnnnnnnnnnnnnnnnnnnnnnnnnnnnnnnnnnnnnnnnnnnnnnnnnnnnnnnnnnnnnnnnnnnnnnnnnnnnnnnnnnnnnnnnnnnnnnnnnnnnnnnnnnnnnnnnnnnnnnnnnnnnnnnnnnnnnnnnnnnnnnnnnnnnnnnnnnnnnnnnnnnnnnnnnnnnnnnnnnnnnnnnnnnnnnnnnnnnnnnnnnnnnnnnnnnnnnnnnnnnnnnnnnnnnnnnnnnnnnnnnnnnnnnnnnnnnnnnnnnnnnnnnnnnnnnnnnnnnnnnnnnnnnnnnnnnnnnnnnnnnnnnnnnnnnnnnnnnnnnnnnnnnnnnnnnnnnnnnnnnnnnnnnnnnnnnnnnnnnnnnnnnnnnnnnnnnnnnnnnnnnnnnnnnnnnnnnnnnnnnnnnnnnnnnnnnnnnnnnnnnnnnnnnnnnnnnnnnnnnnnnnnnnnnnnnnnnnnnnnnnnnnnnnnnnnnnnnnnnnnnnnnnnnnnnnnnnnnnnnnnnnnnnnnnnnnnnnnnnnnnnnnnnnnnnnnnnnnnnnnnnnnnnnnnnnnnnnnnnnnnnnnnnnnnnnnnnnnnnnnnnnnnnnnnnnnnnnnnnnnnnnnnnnnnnnnnnnnnnnnnnnnnnnnnnnnnnnnnnnnnnnnnnnnnnnnnnnnnnnnnnnnnnnnnnnnnnnnnnnnnnnnnnnnnnnnnnnnnnnnnnnnnnnnnnnnnnnnnnnnnnnnnnnnnnnnnnnnnnnnnnnnnnnnnnnnnnnnnnnnnnnnnnnnnnnnnnnnnnnnnnnnnnnnnnnnnnnnnnnnnnnnnnnnnnnnnnnnnnnnnnnnnnnnnnnnnnnnnnnnnnnnnnnnnnnnnnnnnnnnnnnnnnnnnnnnnnnnnnnnnnnnnnnnnnnnnnnnnnnnnnnnnnnnnnnnnnnnnnnnnnnnnnnnnnnnnnnnnnnnnnnnnnnnnnnnnnnnnnnnnnnnnnnnnnnnnnnnnnnnnnnnnnnnnnnnnnnnnnnnnnnnnnnnnnnnnnnnnnnnnnnnnnnnnnnnnnnnnnnnnnnnnnnnnnnnnnnnnnnnnnnnnnnnnnnnnnnnnnnnnnnnnnnnnnnnnnnnnnnnnnnnnnnnnnnnnnnnnnnnnnnnnnnnnnnnnnnnnnnnnnnnnnnnnnnnnnnnnnnnnnnnnnnnnnnnnnnnnnnnnnnnnnnnnnnnnnnnnnnnnnnnnnnnnnnnnnnnnnnnnnnnnnnnnnnnnnnnnnnnnnnnnnnnnnnnnnnnnnnnnnnnnnnnnnnnnnnnnnnnnnnnnnnnnnnnnnnnnnnnnnnnnnnnnnnnnnnnnnnnnnnnnnnnnnnnnnnnnnnnnnnnnnnnnnnnnnnnnnnnnnnnnnnnnnnnnnnnnnnnnnnnnnnnnnnnnnnnnnnnnnnnnnnnnnnnnnnnnnnnnnnnnnnnnnnnnnnnnnnnnnnnnnnnnnnnnnnnnnnnnnnnnnnnnnnnnnnnnnnnnnnnnnnnnnnnnnnnnnnnnnnnnnnnnnnnnnnnnnnnnnnnnnnnnnnnnnnnnnnnnnnnnnnnnnnnnnnnnnnnnnnnnnnnnnnnnnnnnnnnnnnnnnnnnnnnnnnnnnnnnnnnnnnnnnnnnnnnnnnnnnnnnnnnnnnnnnnnnnnnnnnnnnnnnnnnnnnnnnnnnnnnnnnnnnnnnnnnnnnnnnnnnnnnnnnnnnnnnnnnnnnnnnnnnnnnnnnnnnnnnnnnnnnnnnnnnnnnnnnnnnnnnnnnnnnnnnnnnnnnnnnnnnnnnnnnnnnnnnnnnnnnnnnnnnnnnnnnnnnnnnnnnnnnnnnnnnnnnnnnnnnnnnnnnnnnnnnnnnnnnnnnnnnnnnnnnnnnnnnnnnnnnnnnnnnnnnnnnnnnnnnnnnnnnnnnnnnnnnnnnnnnnnnnnnnnnnnnnnnnnnnnnnnnnnnnnnnnnnnnnnnnnnnnnnnnnnnnnnnnnnnnnnnnnnnnnnnnnnnnnnnnnnnnnnnnnnnnnnnnnnnnnnnnnnnnnnnnnnnnnnnnnnnnnnnnnnnnnnnnnnnnnnnnnnnnnnnnnnnnnnnnnnnnnnnnnnnnnnnnnnnnnnnnnnnnnnnnnnnnnnnnnnnnnnnnnnnnnnnnnnnnnnnnnnnnnnnnnnnnnnnnnnnnnnnnnnnnnnnnnnnnnnnnnnnnnnnnnnnnnnnnnnnnnnnnnnnnnnnnnnnnnnnnnnnnnnnnnnnnnnnnnnnnnnnnnnnnnnnnnnnnnnnnnnnnnnnnnnnnnnnnnnnnnnnnnnnnnnnnnnnnnnnnnnnnnnnnnnnnnnnnnnnnnnnnnnnnnnnnnnnnnnnnnnnnnnnnnnnnnnnnnnnnnnnnnnnnnnnnnnnnnnnnnnnnnnnnnnnnnnnnnnnnnnnnnnnnnnnnnnnnnnnnnnnnnnnnnnnnnnnnnnnnnnnnnnnnnnnnnnnnnnnnnnnnnnnnnnnnnnnnnnnnnnnnnnnnnnnnnnnnnnnnnnnnnnnnnnnnnnnnnnnnnnnnnnnnnnnnnnnnnnnnnnnnnnnnnnnnnnnnnnnnnnnnnnnnnnnnnnnnnnnnnnnnnnnnnnnnnnnnnnnnnnnnnnnnnnnnnnnnnnnnnnnnnnnnnnnnnnnnnnnnnnnnnnnnnnnnnnnnnnnnnnnnnnnnnnnnnnnnnnnnnnnnnnnnnnnnnnnnnnnnnnnnnnnnnnnnnnnnnnnnnnnnnnnnnnnnnnnnnnnnnnnnnnnnnnnnnnnnnnnnnnnnnnnnnnnnnnnnnnnnnnnnnnnnnnnnnnnnnnnnnnnnnnnnnnnnnnnnnnnnnnnnnnnnnnnnnnnnnnnnnnnnnnnnnnnnnnnnnnnnnnnnnnnnnnnnnnnnnnnnnnnnnnnnnnnnnnnnnnnnnnnnnnnnnnnnnnnnnnnnnnnnnnnnnnnnnnnnnnnnnnnnnnnnnnnnnnnnnnnnnnnnnnnnnnnnnnnnnnnnnnnnnnnnnnnnnnnnnnnnnnnnnnnnnnnnnnnnnnnnnnnnnnnnnnnnnnnnnnnnnnnnnnnnnnnnnnnnnnnnnnnnnnnnnnnnnnnnnnnnnnnnnnnnnnnnnnnnnnnnnnnnnnnnnnnnnnnnnnnnnnnnnnnnnnnnnnnnnnnnnnnnnnnnnnnnnnnnnnnnnnnnnnnnnnnnnnnnnnnnnnnnnnnnnnnnnnnnnnnnnnnnnnnnnnnnnnnnnnnnnnnnnnnnnnnnnnnnnnnnnnnnnnnnnnnnnnnnnnnnnnnnnnnnnnnnnnnnnnnnnnnnnnnnnnnnnnnnnnnnnnnnnnnnnnnnnnnnnnnnnnnnnnnnnnnnnnnnnnnnnnnnnnnnnnnnnnnnnnnnnnnnnnnnnnnnnnnnnnnnnnnnnnnnnnnnnnnnnnnnnnnnnnnnnnnnnnnnnnnnnnnnnnnnnnnnnnnnnnnnnnnnnnnnnnnnnnnnnnnnnnnnnnnnnnnnnnnnnnnnnnnnnnnnnnnnnnnnnnnnnnnnnnnnnnnnnnnnnnnnnnnnnnnnnnnnnnnnnnnnnnnnnnnnnnnnnnnnnnnnnnnnnnnnnnnnnnnnnnnnnnnnnnnnnnnnnnnnnnnnnnnnnnnnnnnnnnnnnnnnnnnnnnnnnnnnnnnnnnnnnnnnnnnnnnnnnnnnnnnnnnnnnnnnnnnnnnnnnnnnnnnnnnnnnnnnnnnnnnnnnnnnnnnnnnnnnnnnnnnnnnnnnnnnnnnnnnnnnnnnnnnnnnnnnnnnnnnnnnnnnnnnnnnnnnnnnnnnnnnnnnnnnnnnnnnnnnnnnnnnnnnnnnnnnnnnnnnnnnnnnnnnnnnnnnnnnnnnnnnnnnnnnnnnnnnnnnnnnnnnnnnnnnnnnnnnnnnnnnnnnnnnnnnnnnnnnnnnnnnnnnnnnnnnnnnnnnnnnnnnnnnnnnnnnnnnnnnnnnnnnnnnnnnnnnnnnnnnnnnnnnnnnnnnnnnnnnnnnnnnnnnnnnnnnnnnnnnnnnnnnnnnnnnnnnnnnnnnnnnnnnnnnnnnnnnnnnnnnnnnnnnnnnnnnnnnnnnnnnnnnnnnnnnnnnnnnnnnnnnnnnnnnnnnnnnnnnnnnnnnnnnnnnnnnnnnnnnnnnnnnnnnnnnnnnnnnnnnnnnnnnnnnnnnnnnnnnnnnnnnnnnnnnnnnnnnnnnnnnnnnnnnnnnnnnnnnnnnnnnnnnnnnnnnnnnnnnnnnnnnnnnnnnnnnnnnnnnnnnnnnnnnnnnnnnnnnnnnnnnnnnnnnnnnnnnnnnnnnnnnnnnnnnnnnnnnnnnnnnnnnnnnnnnnnnnnnnnnnnnnnnnnnnnnnnnnnnnnnnnnnnnnnnnnnnnnnnnnnnnnnnnnnnnnnnnnnnnnnnnnnnnnnnnnnnnnnnnnnnnnnnnnnnnnnnnnnnnnnnnnnnnnnnnnnnnnnnnnnnnnnnnnnnnnnnnnnnnnnnnnnnnnnnnnnnnnnnnnnnnnnnnnnnnnnnnnnnnnnnnnnnnnnnnnnnnnnnnnnnnnnnnnnnnnnnnnnnnnnnnnnnnnnnnnnnnnnnnnnnnnnnnnnnnnnnnnnnnnnnnnnnnnnnnnnnnnnnnnnnnnnnnnnnnnnnnnnnnnnnnnnnnnnnnnnnnnnnnnnnnnnnnnnnnnnnnnnnnnnnnnnnnnnnnnnnnnnnnnnnnnnnnnnnnnnnnnnnnnnnnnnnnnnnnnnnnnnnnnnnnnnnnnnnnnnnnnnnnnnnnnnnnnnnnnnnnnnnnnnnnnnnnnnnnnnnnnnnnnnnnnnnnnnnnnnnnnnnnnnnnnnnnnnnnnnnnnnnnnnnnnnnnnnnnnnnnnnnnnnnnnnnnnnnnnnnnnnnnnnnnnnnnnnnnnnnnnnnnnnnnnnnnnnnnnnnnnnnnnnnnnnnnnnnnnnnnnnnnnnnnnnnnnnnnnnnnnnnnnnnnnnnnnnnnnnnnnnnnnnnnnnnnnnnnnnnnnnnnnnnnnnnnnnnnnnnnnnnnnnnnnnnnnnnnnnnnnnnnnnnnnnnnnnnnnnnnnnnnnnnnnnnnnnnnnnnnnnnnnnnnnnnnnnnnnnnnnnnnnnnnnnnnnnnnnnnnnnnnnnnnnnnnnnnnnnnnnnnnnnnnnnnnnnnnnnnnnnnnnnnnnnnnnnnnnnnnnnnnnnnnnnnnnnnnnnnnnnnnnnnnnnnnnnnnnnnnnnnnnnnnnnnnnnnnnnnnnnnnnnnnnnnnnnnnnnnnnnnnnnnnnnnnnnnnnnnnnnnnnnnnnnnnnnnnnnnnnnnnnnnnnnnnnnnnnnnnnnnnnnnnnnnnnnnnnnnnnnnnnnnnnnnnnnnnnnnnnnnnnnnnnnnnnnnnnnnnnnnnnnnnnnnnnnnnnnnnnnnnnnnnnnnnnnnnnnnnnnnnnnnnnnnnnnnnnnnnnnnnnnnnnnnnnnnnnnnnnnnnnnnnnnnnnnnnnnnnnnnnnnnnnnnnnnnnnnnnnnnnnnnnnnnnnnnnnnnnnnnnnnnnnnnnnnnnnnnnnnnnnnnnnnnnnnnnnnnnnnnnnnnnnnnnnnnnnnnnnnnnnnnnnnnnnnnnnnnnnnnnnnnnnnnnnnnnnnnnnnnnnnnnnnnnnnnnnnnnnnnnnnnnnnnnnnnnnnnnnnnnnnnnnnnnnnnnnnnnnnnnnnnnnnnnnnnnnnnnnnnnnnnnnnnnnnnnnnnnnnnnnnnnnnnnnnnnnnnnnnnnnnnnnnnnnnnnnnnnnnnnnnnnnnnnnnnnnnnnnnnnnnnnnnnnnnnnnnnnnnnnnnnnnnnnnnnnnnnnnnnnnnnnnnnnnnnnnnnnnnnnnnnnnnnnnnnnnnnnnnnnnnnnnnnnnnnnnnnnnnnnnnnnnnnnnnnnnnnnnnnnnnnnnnnnnnnnnnnnnnnnnnnnnnnnnnnnnnnnnnnnnnnnnnnnnnnnnnnnnnnnnnnnnnnnnnnnnnnnnnnnnnnnnnnnnnnnnnnnnnnnnnnnnnnnnnnnnnnnnnnnnnnnnnnnnnnnnnnnnnnnnnnnnnnnnnnnnnnnnnnnnnnnnnnnnnnnnnnnnnnnnnnnnnnnnnnnnnnnnnnnnnnnnnnnnnnnnnnnnnnnnnnnnnnnnnnnnnnnnnnnnnnnnnnnnnnnnnnnnnnnnnnnnnnnnnnnnnnnnnnnnnnnnnnnnnnnnnnnnnnnnnnnnnnnnnnnnnnnnnnnnnnnnnnnnnnnnnnnnnnnnnnnnnnnnnnnnnnnnnnnnnnnnnnnnnnnnnnnnnnnnnnnnnnnnnnnnnnnnnnnnnnnnnnnnnnnnnnnnnnnnnnnnnnnnnnnnnnnnnnnnnnnnnnnnnnnnnnnnnnnnnnnnnnnnnnnnnnnnnnnnnnnnnnnnnnnnnnnnnnnnnnnnnnnnnnnnnnnnnnnnnnnnnnnnnnnnnnnnnnnnnnnnnnnnnnnnnnnnnnnnnnnnnnnnnnnnnnnnnnnnnnnnnnnnnnnnnnnnnnnnnnnnnnnnnnnnnnnnnnnnnnnnnnnnnnnnnnnnnnnnnnnnnnnnnnnnnnnnnnnnnnnnnnnnnnnnnnnnnnnnnnnnnnnnnnnnnnnnnnnnnnnnnnnnnnnnnnnnnnnnnnnnnnnnnnnnnnnnnnnnnnnnnnnnnnnnnnnnnnnnnnnnnnnnnnnnnnnnnnnnnnnnnnnnnnnnnnnnnnnnnnnnnnnnnnnnnnnnnnnnnnnnnnnnnnnnnnnnnnnnnnnnnnnnnnnnnnnnnnnnnnnnnnnnnnnnnnnnnnnnnnnnnnnnnnnnnnnnnnnnnnnnnnnnnnnnnnnnnnnnnnnnnnnnnnnnnnnnnnnnnnnnnnnnnnnnnnnnnnnnnnnnnnnnnnnnnnnnnnnnnnnnnnnnnnnnnnnnnnnnnnnnnnnnnnnnnnnnnnnnnnnnnnnnnnnnnnnnnnnnnnnnnnnnnnnnnnnnnnnnnnnnnnnnnnnnnnnnnnnnnnnnnnnnnnnnnnnnnnnnnnnnnnnnnnnnnnnnnnnnnnnnnnnnnnnnnnnnnnnnnnnnnnnnnnnnnnnnnnnnnnnnnnnnnnnnnnnnnnnnnnnnnnnnnnnnnnnnnnnnnnnnnnnnnnnnnnnnnnnnnnnnnnnnnnnnnnnnnnnnnnnnnnnnnnnnnnnnnnnnnnnnnnnnnnnnnnnnnnnnnnnnnnnnnnnnnnnnnnnnnnnnnnnnnnnnnnnnnnnnnnnnnnnnnnnnnnnnnnnnnnnnnnnnnnnnnnnnnnnnnnnnnnnnnnnnnnnnnnnnnnnnnnnnnnnnnnnnnnnnnnnnnnnnnnnnnnnnnnnnnnnnnnnnnnnnnnnnnnnnnnnnnnnnnnnnnnnnnnnnnnnnnnnnnnnnnnnnnnnnnnnnnnnnnnnnnnnnnnnnnnnnnnnnnnnnnnnnnnnnnnnnnnnnnnnnnnnnnnnnnnnnnnnnnnnnnnnnnnnnnnnnnnnnnnnnnnnnnnnnnnnnnnnnnnnnnnnnnnnnnnnnnnnnnnnnnnnnnnnnnnnnnnnnnnnnnnnnnnnnnnnnnnnnnnnnnnnnnnnnnnnnnnnnnnnnnnnnnnnnnnnnnnnnnnnnnnnnnnnnnnnnnnnnnnnnnnnnnnnnnnnnnnnnnnnnnnnnnnnnnnnnnnnnnnnnnnnnnnnnnnnnnnnnnnnnnnnnnnnnnnnnnnnnnnnnnnnnnnnnnnnnnnnnnnnnnnnnnnnnnnnnnnnnnnnnnnnnnnnnnnnnnnnnnnnnnnnnnnnnnnnnnnnnnnnnnnnnnnnnnnnnnnnnnnnnnnnnnnnnnnnnnnnnnnnnnnnnnnnnnnnnnnnnnnnnnnnnnnnnnnnnnnnnnnnnnnnnnnnnnnnnnnnnnnnnnnnnnnnnnnnnnnnnnnnnnnnnnnnnnnnnnnnnnnnnnnnnnnnnnnnnnnnnnnnnnnnnnnnnnnnnnnnnnnnnnnnnnnnnnnnnnnnnnnnnnnnnnnnnnnnnnnnnnnnnnnnnnnnnnnnnnnnnnnnnnnnnnnnnnnnnnnnnnnnnnnnnnnnnnnnnnnnnnnnnnnnnnnnnnnnnnnnnnnnnnnnnnnnnnnnnnnnnnnnnnnnnnnnnnnnnnnnnnnnnnnnnnnnnnnnnnnnnnnnnnnnnnnnnnnnnnnnnnnnnnnnnnnnnnnnnnnnnnnnnnnnnnnnnnnnnnnnnnnnnnnnnnnnnnnnnnnnnnnnnnnnnnnnnnnnnnnnnnnnnnnnnnnnnnnnnnnnnnnnnnnnnnnnnnnnnnnnnnnnnnnnnnnnnnnnnnnnnnnnnnnnnnnnnnnnnnnnnnnnnnnnnnnnnnnnnnnnnnnnnnnnnnnnnnnnnnnnnnnnnnnnnnnnnnnnnnnnnnnnnnnnnnnnnnnnnnnnnnnnnnnnnnnnnnnnnnnnnnnnnnnnnnnnnnnnnnnnnnnnnnnnnnnnnnnnnnnnnnnnnnnnnnnnnnnnnnnnnnnnnnnnnnnnnnnnnnnnnnnnnnnnnnnnnnnnnnnnnnnnnnnnnnnnnnnnnnnnnnnnnnnnnnnnnnnnnnnnnnnnnnnnnnnnnnnnnnnnnnnnnnnnnnnnnnnnnnnnnnnnnnnnnnnnnnnnnnnnnnnnnnnnnnnnnnnnnnnnnnnnnnnnnnnnnnnnnnnnnnnnnnnnnnnnnnnnnnnnnnnnnnnnnnnnnnnnnnnnnnnnnnnnnnnnnnnnnnnnnnnnnnnnnnnnnnnnnnnnnnnnnnnnnnnnnnnnnnnnnnnnnnnnnnnnnnnnnnnnnnnnnnnnnnnnnnnnnnnnnnnnnnnnnnnnnnnnnnnnnnnnnnnnnnnnnnnnnnnnnnnnnnnnnnnnnnnnnnnnnnnnnnnnnnnnnnnnnnnnnnnnnnnnnnnnnnnnnnnnnnnnnnnnnnnnnnnnnnnnnnnnnnnnnnnnnnnnnnnnnnnnnnnnnnnnnnnnnnnnnnnnnnnnnnnnnnnnnnnnnnnnnnnnnnnnnnnnnnnnnnnnnnnnnnnnnnnnnnnnnnnnnnnnnnnnnnnnnnnnnnnnnnnnnnnnnnnnnnnnnnnnnnnnnnnnnnnnnnnnnnnnnnnnnnnnnnnnnnnnnnnnnnnnnnnnnnnnnnnnnnnnnnnnnnnnnnnnnnnnnnnnnnnnnnnnnnnnnnnnnnnnnnnnnnnnnnnnnnnnnnnnnnnnnnnnnnnnnnnnnnnnnnnnnnnnnnnnnnnnnnnnnnnnnnnnnnnnnnnnnnnnnnnnnnnnnnnnnnnnnnnnnnnnnnnnnnnnnnnnnnnnnnnnnnnnnnnnnnnnnnnnnnnnnnnnnnnnnnnnnnnnnnnnnnnnnnnnnnnnnnnnnnnnnnnnnnnnnnnnnnnnnnnnnnnnnnnnnnnnnnnnnnnnnnnnnnnnnnnnnnnnnnnnnnnnnnnnnnnnnnnnnnnnnnnnnnnnnnnnnnnnnnnnnnnnnnnnnnnnnnnnnnnnnnnnnnnnnnnnnnnnnnnnnnnnnnnnnnnnnnnnnnnnnnnnnnnnnnnnnnnnnnnnnnnnnnnnnnnnnnnnnnnnnnnnnnnnnnnnnnnnnnnnnnnnnnnnnnnnnnnnnnnnnnnnnnnnnnnnnnnnnnnnnnnnnnnnnnnnnnnnnnnnnnnnnnnnnnnnnnnnnnnnnnnnnnnnnnnnnnnnnnnnnnnnnnnnnnnnnnnnnnnnnnnnnnnnnnnnnnnnnnnnnnnnnnnnnnnnnnnnnnnnnnnnnnnnnnnnnnnnnnnnnnnnnnnnnnnnnnnnnnnnnnnnnnnnnnnnnnnnnnnnnnnnnnnnnnnnnnnnnnnnnnnnnnnnnnnnnnnnnnnnnnnnnnnnnnnnnnnnnnnnnnnnnnnnnnnnnnnnnnnnnnnnnnnnnnnnnnnnnnnnnnnnnnnnnnnnnnnnnnnnnnnnnnnnnnnnnnnnnnnnnnnnnnnnnnnnnnnnnnnnnnnnnnnnnnnnnnnnnnnnnnnnnnnnnnnnnnnnnnnnnnnnnnnnnnnnnnnnnnnnnnnnnnnnnnnnnnnnnnnnnnnnnnnnnnnnnnnnnnnnnnnnnnnnnnnnnnnnnnnnnnnnnnnnnnnnnnnnnnnnnnnnnnnnnnnnnnnnnnnnnnnnnnnnnnnnnnnnnnnnnnnnnnnnnnnnnnnnnnnnnnnnnnnnnnnnnnnnnnnnnnnnnnnnnnnnnnnnnnnnnnnnnnnnnnnnnnnnnnnnnnnnnnnnnnnnnnnnnnnnnnnnnnnnnnnnnnnnnnnnnnnnnnnnnnnnnnnnnnnnnnnnnnnnnnnnnnnnnnnnnnnnnnnnnnnnnnnnnnnnnnnnnnnnnnnnnnnnnnnnnnnnnnnnnnnnnnnnnnnnnnnnnnnnnnnnnnnnnnnnnnnnnnnnnnnnnnnnnnnnnnnnnnnnnnnnnnnnnnnnnnnnnnnnnnnnnnnnnnnnnnnnnnnnnnnnnnnnnnnnnnnnnnnnnnnnnnnnnnnnnnnnnnnnnnnnnnnnnnnnnnnnnnnnnnnnnnnnnnnnnnnnnnnnnnnnnnnnnnnnnnnnnnnnnnnnnnnnnnnnnnnnnnnnnnnnnnnnnnnnnnnnnnnnnnnnnnnnnnnnnnnnnnnnnnnnnnnnnnnnnnnnnnnnnnnnnnnnnnnnnnnnnnnnnnnnnnnnnnnnnnnnnnnnnnnnnnnnnnnnnnnnnnnnnnnnnnnnnnnnnnnnnnnnnnnnnnnnnnnnnnnnnnnnnnnnnnnnnnnnnnnnnnnnnnnnnnnnnnnnnnnnnnnnnnnnnnnnnnnnnnnnnnnnnnnnnnnnnnnnnnnnnnnnnnnnnnnnnnnnnnnnnnnnnnnnnnnnnnnnnnnnnnnnnnnnnnnnnnnnnnnnnnnnnnnnnnnnnnnnnnnnnnnnnnnnnnnnnnnnnnnnnnnnnnnnnnnnnnnnnnnnnnnnnnnnnnnnnnnnnnnnnnnnnnnnnnnnnnnnnnnnnnnnnnnnnnnnnnnnnnnnnnnnnnnnnnnnnnnnnnnnnnnnnnnnnnnnnnnnnnnnnnnnnnnnnnnnnnnnnnnnnnnnnnnnnnnnnnnnnnnnnnnnnnnnnnnnnnnnnnnnnnnnnnnnnnnnnnnnnnnnnnnnnnnnnnnnnnnnnnnnnnnnnnnnnnnnnnnnnnnnnnnnnnnnnnnnnnnnnnnnnnnnnnnnnnnnnnnnnnnnnnnnnnnnnnnnnnnnnnnnnnnnnnnnnnnnnnnnnnnnnnnnnnnnnnnnnnnnnnnnnnnnnnnnnnnnnnnnnnnnnnnnnnnnnnnnnnnnnnnnnnnnnnnnnnnnnnnnnnnnnnnnnnnnnnnnnnnnnnnnnnnnnnnnnnnnnnnnnnnnnnnnnnnnnnnnnnnnnnnnnnnnnnnnnnnnnnnnnnnnnnnnnnnnnnnnnnnnnnnnnnnnnnnnnnnnnnnnnnnnnnnnnnnnnnnnnnnnnnnnnnnnnnnnnnnnnnnnnnnnnnnnnnnnnnnnnnnnnnnnnnnnnnnnnnnnnnnnnnnnnnnnnnnnnnnnnnnnnnnnnnnnnnnnnnnnnnnnnnnnnnnnnnnnnnnnnnnnnnnnnnnnnnnnnnnnnnnnnnnnnnnnnnnnnnnnnnnnnnnnnnnnnnnnnnnnnnnnnnnnnnnnnnnnnnnnnnnnnnnnnnnnnnnnnnnnnnnnnnnnnnnnnnnnnnnnnnnnnnnnnnnnnnnnnnnnnnnnnnnnnnnnnnnnnnnnnnnnnnnnnnnnnnnnnnnnnnnnnnnnnnnnnnnnnnnnnnnnnnnnnnnnnnnnnnnnnnnnnnnnnnnnnnnnnnnnnnnnnnnnnnnnnnnnnnnnnnnnnnnnnnnnnnnnnnnnnnnnnnnnnnnnnnnnnnnnnnnnnnnnnnnnnnnnnnnnnnnnnnnnnnnnnnnnnnnnnnnnnnnnnnnnnnnnnnnnnnnnnnnnnnnnnnnnnnnnnnnnnnnnnnnnnnnnnnnnnnnnnnnnnnnnnnnnnnnnnnnnnnnnnnnnnnnnnnnnnnnnnnnnnnnnnnnnnnnnnnnnnnnnnnnnnnnnnnnnnnnnnnnnnnnnnnnnnnnnnnnnnnnnnnnnnnnnnnnnnnnnnnnnnnnnnnnnnnnnnnnnnnnnnnnnnnnnnnnnnnnnnnnnnnnnnnnnnnnnnnnnnnnnnnnnnnnnnnnnnnnnnnnnnnnnnnnnnnnnnnnnnnnnnnnnnnnnnnnnnnnnnnnnnnnnnnnnnnnnnnnnnnnnnnnnnnnnnnnnnnnnnnnnnnnnnnnnnnnnnnnnnnnnnnnnnnnnnnnnnnnnnnnnnnnnnnnnnnnnnnnnnnnnnnnnnnnnnnnnnnnnnnnnnnnnnnnnnnnnnnnnnnnnnnnnnnnnnnnnnnnnnnnnnnnnnnnnnnnnnnnnnnnnnnnnnnnnnnnnnnnnnnnnnnnnnnnnnnnnnnnnnnnnnnnnnnnnnnnnnnnnnnnnnnnnnnnnnnnnnnnnnnnnnnnnnnnnnnnnnnnnnnnnnnnnnnnnnnnnnnnnnnnnnnnnnnnnnnnnnnnnnnnnnnnnnnnnnnnnnnnnnnnnnnnnnnnnnnnnnnnnnnnnnnnnnnnnnnnnnnnnnnnnnnnnnnnnnnnnnnnnnnnnnnnnnnnnnnnnnnnnnnnnnnnnnnnnnnnnnnnnnnnnnnnnnnnnnnnnnnnnnnnnnnnnnnnnnnnnnnnnnnnnnnnnnnnnnnnnnnnnnnnnnnnnnnnnnnnnnnnnnnnnnnnnnnnnnnnnnnnnnnnnnnnnnnnnnnnnnnnnnnnnnnnnnnnnnnnnnnnnnnnnnnnnnnnnnnnnnnnnnnnnnnnnnnnnnnnnnnnnnnnnnnnnnnnnnnnnnnnnnnnnnnnnnnnnnnnnnnnnnnnnnnnnnnnnnnnnnnnnnnnnnnnnnnnnnnnnnnnnnnnnnnnnnnnnnnnnnnnnnnnnnnnnnnnnnnnnnnnnnnnnnnnnnnnnnnnnnnnnnnnnnnnnnnnnnnnnnnnnnnnnnnnnnnnnnnnnnnnnnnnnnnnnnnnnnnnnnnnnnnnnnnnnnnnnnnnnnnnnnnnnnnnnnnnnnnnnnnnnnnnnnnnnnnnnnnnnnnnnnnnnnnnnnnnnnnnnnnnnnnnnnnnnnnnnnnnnnnnnnnnnnnnnnnnnnnnnnnnnnnnnnnnnnnnnnnnnnnnnnnnnnnnnnnnnnnnnnnnnnnnnnnnnnnnnnnnnnnnnnnnnnnnnnnnnnnnnnnnnnnnnnnnnnnnnnnnnnnnnnnnnnnnnnnnnnnnnnnnnnnnnnnnnnnnnnnnnnnnnnnnnnnnnnnnnnnnnnnnnnnnnnnnnnnnnnnnnnnnnnnnnnnnnnnnnnnnnnnnnnnnnnnnnnnnnnnnnnnnnnnnnnnnnnnnnnnnnnnnnnnnnnnnnnnnnnnnnnnnnnnnnnnnnnnnnnnnnnnnnnnnnnnnnnnnnnnnnnnnnnnnnnnnnnnnnnnnnnnnnnnnnnnnnnnnnnnnnnnnnnnnnnnnnnnnnnnnnnnnnnnnnnnnnnnnnnnnnnnnnnnnnnnnnnnnnnnnnnnnnnnnnnnnnnnnnnnnnnnnnnnnnnnnnnnnnnnnnnnnnnnnnnnnnnnnnnnnnnnnnnnnnnnnnnnnnnnnnnnnnnnnnnnnnnnnnnnnnnnnnnnnnnnnnnnnnnnnnnnnnnnnnnnnnnnnnnnnnnnnnnnnnnnnnnnnnnnnnnnnnnnnnnnnnnnnnnnnnnnnnnnnnnnnnnnnnnnnnnnnnnnnnnnnnnnnnnnnnnnnnnnnnnnnnnnnnnnnnnnnnnnnnnnnnnnnnnnnnnnnnnnnnnnnnnnnnnnnnnnnnnnnnnnnnnnnnnnnnnnnnnnnnnnnnnnnnnnnnnnnnnnnnnnnnnnnnnnnnnnnnnnnnnnnnnnnnnnnnnnnnnnnnnnnnnnnnnnnnnnnnnnnnnnnnnnnnnnnnnnnnnnnnnnnnnnnnnnnnnnnnnnnnnnnnnnnnnnnnnnnnnnnnnnnnnnnnnnnnnnnnnnnnnnnnnnnnnnnnnnnnnnnnnnnnnnnnnnnnnnnnnnnnnnnnnnnnnnnnnnnnnnnnnnnnnnnnnnnnnnnnnnnnnnnnnnnnnnnnnnnnnnnnnnnnnnnnnnnnnnnnnnnnnnnnnnnnnnnnnnnnnnnnnnnnnnnnnnnnnnnnnnnnnnnnnnnnnnnnnnnnnnnnnnnnnnnnnnnnnnnnnnnnnnnnnnnnnnnnnnnnnnnnnnnnnnnnnnnnnnnnnnnnnnnnnnnnnnnnnnnnnnnnnnnnnnnnnnnnnnnnnnnnnnnnnnnnnnnnnnnnnnnnnnnnnnnnnnnnnnnnnnnnnnnnnnnnnnnnnnnnnnnnnnnnnnnnnnnnnnnnnnnnnnnnnnnnnnnnnnnnnnnnnnnnnnnnnnnnnnnnnnnnnnnnnnnnnnnnnnnnnnnnnnnnnnnnnnnnnnnnnnnnnnnnnnnnnnnnnnnnnnnnnnnnnnnnnnnnnnnnnnnnnnnnnnnnnnnnnnnnnnnnnnnnnnnnnnnnnnnnnnnnnnnnnnnnnnnnnnnnnnnnnnnnnnnnnnnnnnnnnnnnnnnnnnnnnnnnnnnnnnnnnnnnnnnnnnnnnnnnnnnnnnnnnnnnnnnnnnnnnnnnnnnnnnnnnnnnnnnnnnnnnnnnnnnnnnnnnnnnnnnnnnnnnnnnnnnnnnnnnnnnnnnnnnnnnnnnnnnnnnnnnnnnnnnnnnnnnnnnnnnnnnnnnnnnnnnnnnnnnnnnnnnnnnnnnnnnnnnnnnnnnnnnnnnnnnnnnnnnnnnnnnnnnnnnnnnnnnnnnnnnnnnnnnnnnnnnnnnnnnnnnnnnnnnnnnnnnnnnnnnnnnnnnnnnnnnnnnnnnnnnnnnnnnnnnnnnnnnnnnnnnnnnnnnnnnnnnnnnnnnnnnnnnnnnnnnnnnnnnnnnnnnnnnnnnnnnnnnnnnnnnnnnnnnnnnnnnnnnnnnnnnnnnnnnnnnnnnnnnnnnnnnnnnnnnnnnnnnnnnnnnnnnnnnnnnnnnnnnnnnnnnnnnnnnnnnnnnnnnnnnnnnnnnnnnnnnnnnnnnnnnnnnnnnnnnnnnnnnnnnnnnnnnnnnnnnnnnnnnnnnnnnnnnnnnnnnnnnnnnnnnnnnnnnnnnnnnnnnnnnnnnnnnnnnnnnnnnnnnnnnnnnnnnnnnnnnnnnnnnnnnnnnnnnnnnnnnnnnnnnnnnnnnnnnnnnnnnnnnnnnnnnnnnnnnnnnnnnnnnnnnnnnnnnnnnnnnnnnnnnnnnnnnnnnnnnnnnnnnnnnnnnnnnnnnnnnnnnnnnnnnnnnnnnnnnnnnnnnnnnnnnnnnnnnnnnnnnnnnnnnnnnnnnnnnnnnnnnnnnnnnnnnnnnnnnnnnnnnnnnnnnnnnnnnnnnnnnnnnnnnnnnnnnnnnnnnnnnnnnnnnnnnnnnnnnnnnnnnnnnnnnnnnnnnnnnnnnnnnnnnnnnnnnnnnnnnnnnnnnnnnnnnnnnnnnnnnnnnnnnnnnnnnnnnnnnnnnnnnnnnnnnnnnnnnnnnnnnnnnnnnnnnnnnnnnnnnnnnnnnnnnnnnnnnnnnnnnnnnnnnnnnnnnnnnnnnnnnnnnnnnnnnnnnnnnnnnnnnnnnnnnnnnnnnnnnnnnnnnnnnnnnnnnnnnnnnnnnnnnnnnnnnnnnnnnnnnnnnnnnnnnnnnnnnnnnnnnnnnnnnnnnnnnnnnnnnnnnnnnnnnnnnnnnnnnnnnnnnnnnnnnnnnnnnnnnnnnnnnnnnnnnnnnnnnnnnnnnnnnnnnnnnnnnnnnnnnnnnnnnnnnnnnnnnnnnnnnnnnnnnnnnnnnnnnnnnnnnnnnnnnnnnnnnnnnnnnnnnnnnnnnnnnnnnnnnnnnnnnnnnnnnnnnnnnnnnnnnnnnnnnnnnnnnnnnnnnnnnnnnnnnnnnnnnnnnnnnnnnnnnnnnnnnnnnnnnnnnnnnnnnnnnnnnnnnnnnnnnnnnnnnnnnnnnnnnnnnnnnnnnnnnnnnnnnnnnnnnnnnnnnnnnnnnnnnnnnnnnnnnnnnnnnnnnnnnnnnnnnnnnnnnnnnnnnnnnnnnnnnnnnnnnnnnnnnnnnnnnnnnnnnnnnnnnnnnnnnnnnnnnnnnnnnnnnnnnnnnnnnnnnnnnnnnnnnnnnnnnnnnnnnnnnnnnnnnnnnnnnnnnnnnnnnnnnnnnnnnnnnnnnnnnnnnnnnnnnnnnnnnnnnnnnnnnnnnnnnnnnnnnnnnnnnnnnnnnnnnnnnnnnnnnnnnnnnnnnnnnnnnnnnnnnnnnnnnnnnnnnnnnnnnnnnnnnnnnnnnnnnnnnnnnnnnnnnnnnnnnnnnnnnnnnnnnnnnnnnnnnnnnnnnnnnnnnnnnnnnnnnnnnnnnnnnnnnnnnnnnnnnnnnnnnnnnnnnnnnnnnnnnnnnnnnnnnnnnnnnnnnnnnnnnnnnnnnnnnnnnnnnnnnnnnnnnnnnnnnnnnnnnnnnnnnnnnnnnnnnnnnnnnnnnnnnnnnnnnnnnnnnnnnnnnnnnnnnnnnnnnnnnnnnnnnnnnnnnnnnnnnnnnnnnnnnnnnnnnnnnnnnnnnnnnnnnnnnnnnnnnnnnnnnnnnnnnnnnnnnnnnnnnnnnnnnnnnnnnnnnnnnnnnnnnnnnnnnnnnnnnnnnnnnnnnnnnnnnnnnnnnnnnnnnnnnnnnnnnnnnnnnnnnnnnnnnnnnnnnnnnnnnnnnnnnnnnnnnnnnnnnnnnnnnnnnnnnnnnnnnnnnnnnnnnnnnnnnnnnnnnnnnnnnnnnnnnnnnnnnnnnnnnnnnnnnnnnnnnnnnnnnnnnnnnnnnnnnnnnnnnnnnnnnnnnnnnnnnnnnnnnnnnnnnnnnnnnnnnnnnnnnnnnnnnnnnnnnnnnnnnnnnnnnnnnnnnnnnnnnnnnnnnnnnnnnnnnnnnnnnnnnnnnnnnnnnnnnnnnnnnnnnnnnnnnnnnnnnnnnnnnnnnnnnnnnnnnnnnnnnnnnnnnnnnnnnnnnnnnnnnnnnnnnnnnnnnnnnnnnnnnnnnnnnnnnnnnnnnnnnnnnnnnnnnnnnnnnnnnnnnnnnnnnnnnnnnnnnnnnnnnnnnnnnnnnnnnnnnnnnnnnnnnnnnnnnnnnnnnnnnnnnnnnnnnnnnnnnnnnnnnnnnnnnnnnnnnnnnnnnnnnnnnnnnnnnnnnnnnnnnnnnnnnnnnnnnnnnnnnnnnnnnnnnnnnnnnnnnnnnnnnnnnnnnnnnnnnnnnnnnnnnnnnnnnnnnnnnnnnnnnnnnnnnnnnnnnnnnnnnnnnnnnnnnnnnnnnnnnnnnnnnnnnnnnnnnnnnnnnnnnnnnnnnnnnnnnnnnnnnnnnnnnnnnnnnnnnnnnnnnnnnnnnnnnnnnnnnnnnnnnnnnnnnnnnnnnnnnnnnnnnnnnnnnnnnnnnnnnnnnnnnnnnnnnnnnnnnnnnnnnnnnnnnnnnnnnnnnnnnnnnnnnnnnnnnnnnnnnnnnnnnnnnnnnnnnnnnnnnnnnnnnnnnnnnnnnnnnnnnnnnnnnnnnnnnnnnnnnnnnnnnnnnnnnnnnnnnnnnnnnnnnnnnnnnnnnnnnnnnnnnnnnnnnnnnnnnnnnnnnnnnnnnnnnnnnnnnnnnnnnnnnnnnnnnnnnnnnnnnnnnnnnnnnnnnnnnnnnnnnnnnnnnnnnnnnnnnnnnnnnnnnnnnnnnnnnnnnnnnnnnnnnnnnnnnnnnnnnnnnnnnnnnnnnnnnnnnnnnnnnnnnnnnnnnnnnnnnnnnnnnnnnnnnnnnnnnnnnnnnnnnnnnnnnnnnnnnnnnnnnnnnnnnnnnnnnnnnnnnnnnnnnnnnnnnnnnnnnnnnnnnnnnnnnnnnnnnnnnnnnnnnnnnnnnnnnnnnnnnnnnnnnnnnnnnnnnnnnnnnnnnnnnnnnnnnnnnnnnnnnnnnnnnnnnnnnnnnnnnnnnnnnnnnnnnnnnnnnnnnnnnnnnnnnnnnnnnnnnnnnnnnnnnnnnnnnnnnnnnnnnnnnnnnnnnnnnnnnnnnnnnnnnnnnnnnnnnnnnnnnnnnnnnnnnnnnnnnnnnnnnnnnnnnnnnnnnnnnnnnnnnnnnnnnnnnnnnnnnnnnnnnnnnnnnnnnnnnnnnnnnnnnnnnnnnnnnnnnnnnnnnnnnnnnnnnnnnnnnnnnnnnnnnnnnnnnnnnnnnnnnnnnnnnnnnnnnnnnnnnnnnnnnnnnnnnnnnnnnnnnnnnnnnnnnnnnnnnnnnnnnnnnnnnnnnnnnnnnnnnnnnnnnnnnnnnnnnnnnnnnnnnnnnnnnnnnnnnnnnnnnnnnnnnnnnnnnnnnnnnnnnnnnnnnnnnnnnnnnnnnnnnnnnnnnnnnnnnnnnnnnnnnnnnnnnnnnnnnnnnnnnnnnnnnnnnnnnnnnnnnnnnnnnnnnnnnnnnnnnnnnnnnnnnnnnnnnnnnnnnnnnnnnnnnnnnnnnnnnnnnnnnnnnnnnnnnnnnnnnnnnnnnnnnnnnnnnnnnnnnnnnnnnnnnnnnnnnnnnnnnnnnnnnnnnnnnnnnnnnnnnnnnnnnnnnnnnnnnnnnnnnnnnnnnnnnnnnnnnnnnnnnnnnnnnnnnnnnnnnnnnnnnnnnnnnnnnnnnnnnnnnnnnnnnnnnnnnnnnnnnnnnnnnnnnnnnnnnnnnnnnnnnnnnnnnnnnnnnnnnnnnnnnnnnnnnnnnnnnnnnnnnnnnnnnnnnnnnnnnnnnnnnnnnnnnnnnnnnnnnnnnnnnnnnnnnnnnnnnnnnnnnnnnnnnnnnnnnnnnnnnnnnnnnnnnnnnnnnnnnnnnnnnnnnnnnnnnnnnnnnnnnnnnnnnnnnnnnnnnnnnnnnnnnnnnnnnnnnnnnnnnnnnnnnnnnnnnnnnnnnnnnnnnnnnnnnnnnnnnnnnnnnnnnnnnnnnnnnnnnnnnnnnnnnnnnnnnnnnnnnnnnnnnnnnnnnnnnnnnnnnnnnnnnnnnnnnnnnnnnnnnnnnnnnnnnnnnnnnnnnnnnnnnnnnnnnnnnnnnnnnnnnnnnnnnnnnnnnnnnnnnnnnnnnnnnnnnnnnnnnnnnnnnnnnnnnnnnnnnnnnnnnnnnnnnnnnnnnnnnnnnnnnnnnnnnnnnnnnnnnnnnnnnnnnnnnnnnnnnnnnnnnnnnnnnnnnnnnnnnnnnnnnnnnnnnnnnnnnnnnnnnnnnnnnnnnnnnnnnnnnnnnnnnnnnnnnnnnnnnnnnnnnnnnnnnnnnnnnnnnnnnnnnnnnnnnnnnnnnnnnnnnnnnnnnnnnnnnnnnnnnnnnnnnnnnnnnnnnnnnnnnnnnnnnnnnnnnnnnnnnnnnnnnnnnnnnnnnnnnnnnnnnnnnnnnnnnnnnnnnnnnnnnnnnnnnnnnnnnnnnnnnnnnnnnnnnnnnnnnnnnnnnnnnnnnnnnnnnnnnnnnnnnnnnnnnnnnnnnnnnnnnnnnnnnnnnnnnnnnnnnnnnnnnnnnnnnnnnnnnnnnnnnnnnnnnnnnnnnnnnnnnnnnnnnnnnnnnnnnnnnnnnnnnnnnnnnnnnnnnnnnnnnnnnnnnnnnnnnnnnnnnnnnnnnnnnnnnnnnnnnnnnnnnnnnnnnnnnnnnnnnnnnnnnnnnnnnnnnnnnnnnnnnnnnnnnnnnnnnnnnnnnnnnnnnnnnnnnnnnnnnnnnnnnnnnnnnnnnnnnnnnnnnnnnnnnnnnnnnnnnnnnnnnnnnnnnnnnnnnnnnnnnnnnnnnnnnnnnnnnnnnnnnnnnnnnnnnnnnnnnnnnnnnnnnnnnnnnnnnnnnnnnnnnnnnnnnnnnnnnnnnnnnnnnnnnnnnnnnnnnnnnnnnnnnnnnnnnnnnnnnnnnnnnnnnnnnnnnnnnnnnnnnnnnnnnnnnnnnnnnnnnnnnnnnnnnnnnnnnnnnnnnnnnnnnnnnnnnnnnnnnnnnnnnnnnnnnnnnnnnnnnnnnnnnnnnnnnnnnnnnnnnnnnnnnnnnnnnnnnnnnnnnnnnnnnnnnnnnnnnnnnnnnnnnnnnnnnnnnnnnnnnnnnnnnnnnnnnnnnnnnnnnnnnnnnnnnnnnnnnnnnnnnnnnnnnnnnnnnnnnnnnnnnnnnnnnnnnnnnnnnnnnnnnnnnnnnnnnnnnnnnnnnnnnnnnnnnnnnnnnnnnnnnnnnnnnnnnnnnnnnnnnnnnnnnnnnnnnnnnnnnnnnnnnnnnnnnnnnnnnnnnnnnnnnnnnnnnnnnnnnnnnnnnnnnnnnnnnnnnnnnnnnnnnnnnnnnnnnnnnnnnnnnnnnnnnnnnnnnnnnnnnnnnnnnnnnnnnnnnnnnnnnnnnnnnnnnnnnnnnnnnnnnnnnnnnnnnnnnnnnnnnnnnnnnnnnnnnnnnnnnnnnnnnnnnnnnnnnnnnnnnnnnnnnnnnnnnnnnnnnnnnnnnnnnnnnnnnnnnnnnnnnnnnnnnnnnnnnnnnnnnnnnnnnnnnnnnnnnnnnnnnnnnnnnnnnnnnnnnnnnnnnnnnnnnnnnnnnnnnnnnnnnnnnnnnnnnnnnnnnnnnnnnnnnnnnnnnnnnnnnnnnnnnnnnnnnnnnnnnnnnnnnnnnnnnnnnnnnnnnnnnnnnnnnnnnnnnnnnnnnnnnnnnnnnnnnnnnnnnnnnnnnnnnnnnnnnnnnnnnnnnnnnnnnnnnnnnnnnnnnnnnnnnnnnnnnnnnnnnnnnnnnnnnnnnnnnnnnnnnnnnnnnnnnnnnnnnnnnnnnnnnnnnnnnnnnnnnnnnnnnnnnnnnnnnnnnnnnnnnnnnnnnnnnnnnnnnnnnnnnnnnnnnnnnnnnnnnnnnnnnnnnnnnnnnnnnnnnnnnnnnnnnnnnnnnnnnnnnnnnnnnnnnnnnnnnnnnnnnnnnnnnnnnnnnnnnnnnnnnnnnnnnnnnnnnnnnnnnnnnnnnnnnnnnnnnnnnnnnnnnnnnnnnnnnnnnnnnnnnnnnnnnnnnnnnnnnnnnnnnnnnnnnnnnnnnnnnnnnnnnnnnnnnnnnnnnnnnnnnnnnnnnnnnnnnnnnnnnnnnnnnnnnnnnnnnnnnnnnnnnnnnnnnnnnnnnnnnnnnnnnnnnnnnnnnnnnnnnnnnnnnnnnnnnnnnnnnnnnnnnnnnnnnnnnnnnnnnnnnnnnnnnnnnnnnnnnnnnnnnnnnnnnnnnnnnnnnnnnnnnnnnnnnnnnnnnnnnnnnnnnnnnnnnnnnnnnnnnnnnnnnnnnnnnnnnnnnnnnnnnnnnnnnnnnnnnnnnnnnnnnnnnnnnnnnnnnnnnnnnnnnnnnnnnnnnnnnnnnnnnnnnnnnnnnnnnnnnnnnnnnnnnnnnnnnnnnnnnnnnnnnnnnnnnnnnnnnnnnnnnnnnnnnnnnnnnnnnnnnnnnnnnnnnnnnnnnnnnnnnnnnnnnnnnnnnnnnnnnnnnnnnnnnnnnnnnnnnnnnnnnnnnnnnnnnnnnnnnnnnnnnnnnnnnnnnnnnnnnnnnnnnnnnnnnnnnnnnnnnnnnnnnnnnnnnnnnnnnnnnnnnnnnnnnnnnnnnnnnnnnnnnnnnnnnnnnnnnnnnnnnnnnnnnnnnnnnnnnnnnnnnnnnnnnnnnnnnnnnnnnnnnnnnnnnnnnnnnnnnnnnnnnnnnnnnnnnnnnnnnnnnnnnnnnnnnnnnnnnnnnnnnnnnnnnnnnnnnnnnnnnnnnnnnnnnnnnnnnnnnnnnnnnnnnnnnnnnnnnnnnnnnnnnnnnnnnnnnnnnnnnnnnnnnnnnnnnnnnnnnnnnnnnnnnnnnnnnnnnnnnnnnnnnnnnnnnnnnnnnnnnnnnnnnnnnnnnnnnnnnnnnnnnnnnnnnnnnnnnnnnnnnnnnnnnnnnnnnnnnnnnnnnnnnnnnnnnnnnnnnnnnnnnnnnnnnnnnnnnnnnnnnnnnnnnnnnnnnnnnnnnnnnnnnnnnnnnnnnnnnnnnnnnnnnnnnnnnnnnnnnnnnnnnnnnnnnnnnnnnnnnnnnnnnnnnnnnnnnnnnnnnnnnnnnnnnnnnnnnnnnnnnnnnnnnnnnnnnnnnnnnnnnnnnnnnnnnnnnnnnnnnnnnnnnnnnnnnnnnnnnnnnnnnnnnnnnnnnnnnnnnnnnnnnnnnnnnnnnnnnnnnnnnnnnnnnnnnnnnnnnnnnnnnnnnnnnnnnnnnnnnnnnnnnnnnnnnnnnnnnnnnnnnnnnnnnnnnnnnnnnnnnnnnnnnnnnnnnnnnnnnnnnnnnnnnnnnnnnnnnnnnnnnnnnnnnnnnnnnnnnnnnnnnnnnnnnnnnnnnnnnnnnnnnnnnnnnnnnnnnnnnnnnnnnnnnnnnnnnnnnnnnnnnnnnnnnnnnnnnnnnnnnnnnnnnnnnnnnnnnnnnnnnnnnnnnnnnnnnnnnnnnnnnnnnnnnnnnnnnnnnnnnnnnnnnnnnnnnnnnnnnnnnnnnnnnnnnnnnnnnnnnnnnnnnnnnnnnnnnnnnnnnnnnnnnnnnnnnnnnnnnnnnnnnnnnnnnnnnnnnnnnnnnnnnnnnnnnnnnnnnnnnnnnnnnnnnnnnnnnnnnnnnnnnnnnnnnnnnnnnnnnnnnnnnnnnnnnnnnnnnnnnnnnnnnnnnnnnnnnnnnnnnnnnnnnnnnnnnnnnnnnnnnnnnnnnnnnnnnnnnnnnnnnnnnnnnnnnnnnnnnnnnnnnnnnnnnnnnnnnnnnnnnnnnnnnnnnnnnnnnnnnnnnnnnnnnnnnnnnnnnnnnnnnnnnnnnnnnnnnnnnnnnnnnnnnnnnnnnnnnnnnnnnnnnnnnnnnnnnnnnnnnnnnnnnnnnnnnnnnnnnnnnnnnnnnnnnnnnnnnnnnnnnnnnnnnnnnnnnnnnnnnnnnnnnnnnnnnnnnnnnnnnnnnnnnnnnnnnnnnnnnnnnnnnnnnnnnnnnnnnnnnnnnnnnnnnnnnnnnnnnnnnnnnnnnnnnnnnnnnnnnnnnnnnnnnnnnnnnnnnnnnnnnnnnnnnnnnnnnnnnnnnnnnnnnnnnnnnnnnnnnnnnnnnnnnnnnnnnnnnnnnnnnnnnnnnnnnnnnnnnnnnnnnnnnnnnnnnnnnnnnnnnnnnnnnnnnnnnnnnnnnnnnnnnnnnnnnnnnnnnnnnnnnnnnnnnnnnnnnnnnnnnnnnnnnnnnnnnnnnnnnnnnnnnnnnnnnnnnnnnnnnnnnnnnnnnnnnnnnnnnnnnnnnnnnnnnnnnnnnnnnnnnnnnnnnnnnnnnnnnnnnnnnnnnnnnnnnnnnnnnnnnnnnnnnnnnnnnnnnnnnnnnnnnnnnnnnnnnnnnnnnnnnnnnnnnnnnnnnnnnnnnnnnnnnnnnnnnnnnnnnnnnnnnnnnnnnnnnnnnnnnnnnnnnnnnnnnnnnnnnnnnnnnnnnnnnnnnnnnnnnnnnnnnnnnnnnnnnnnnnnnnnnnnnnnnnnnnnnnnnnnnnnnnnnnnnnnnnnnnnnnnnnnnnnnnnnnnnnnnnnnnnnnnnnnnnnnnnnnnnnnnnnnnnnnnnnnnnnnnnnnnnnnnnnnnnnnnnnnnnnnnnnnnnnnnnnnnnnnnnnnnnnnnnnnnnnnnnnnnnnnnnnnnnnnnnnnnnnnnnnnnnnnnnnnnnnnnnnnnnnnnnnnnnnnnnnnnnnnnnnnnnnnnnnnnnnnnnnnnnnnnnnnnnnnnnnnnnnnnnnnnnnnnnnnnnnnnnnnnnnnnnnnnnnnnnnnnnnnnnnnnnnnnnnnnnnnnnnnnnnnnnnnnnnnnnnnnnnnnnnnnnnnnnnnnnnnnnnnnnnnnnnnnnnnnnnnnnnnnnnnnnnnnnnnnnnnnnnnnnnnnnnnnnnnnnnnnnnnnnnnnnnnnnnnnnnnnnnnnnnnnnnnnnnnnnnnnnnnnnnnnnnnnnnnnnnnnnnnnnnnnnnnnnnnnnnnnnnnnnnnnnnnnnnnnnnnnnnnnnnnnnnnnnnnnnnnnnnnnnnnnnnnnnnnnnnnnnnnnnnnnnnnnnnnnnnnnnnnnnnnnnnnnnnnnnnnnnnnnnnnnnnnnnnnnnnnnnnnnnnnnnnnnnnnnnnnnnnnnnnnnnnnnnnnnnnnnnnnnnnnnnnnnnnnnnnnnnnnnnnnnnnnnnnnnnnnnnnnnnnnnnnnnnnnnnnnnnnnnnnnnnnnnnnnnnnnnnnnnnnnnnnnnnnnnnnnnnnnnnnnnnnnnnnnnnnnnnnnnnnnnnnnnnnnnnnnnnnnnnnnnnnnnnnnnnnnnnnnnnnnnnnnnnnnnnnnnnnnnnnnnnnnnnnnnnnnnnnnnnnnnnnnnnnnnnnnnnnnnnnnnnnnnnnnnnnnnnnnnnnnnnnnnnnnnnnnnnnnnnnnnnnnnnnnnnnnnnnnnnnnnnnnnnnnnnnnnnnnnnnnnnnnnnnnnnnnnnnnnnnnnnnnnnnnnnnnnnnnnnnnnnnnnnnnnnnnnnnnnnnnnnnnnnnnnnnnnnnnnnnnnnnnnnnnnnnnnnnnnnnnnnnnnnnnnnnnnnnnnnnnnnnnnnnnnnnnnnnnnnnnnnnnnnnnnnnnnnnnnnnnnnnnnnnnnnnnnnnnnnnnnnnnnnnnnnnnnnnnnnnnnnnnnnnnnnnnnnnnnnnnnnnnnnnnnnnnnnnnnnnnnnnnnnnnnnnnnnnnnnnnnnnnnnnnnnnnnnnnnnnnnnnnnnnnnnnnnnnnnnnnnnnnnnnnnnnnnnnnnnnnnnnnnnnnnnnnnnnnnnnnnnnnnnnnnnnnnnnnnnnnnnnnnnnnnnnnnnnnnnnnnnnnnnnnnnnnnnnnnnnnnnnnnnnnnnnnnnnnnnnnnnnnnnnnnnnnnnnnnnnnnnnnnnnnnnnnnnnnnnnnnnnnnnnnnnnnnnnnnnnnnnnnnnnnnnnnnnnnnnnnnnnnnnnnnnnnnnnnnnnnnnnnnnnnnnnnnnnnnnnnnnnnnnnnnnnnnnnnnnnnnnnnnnnnnnnnnnnnnnnnnnnnnnnnnnnnnnnnnnnnnnnnnnnnnnnnnnnnnnnnnnnnnnnnnnnnnnnnnnnnnnnnnnnnnnnnnnnnnnnnnnnnnnnnnnnnnnnnnnnnnnnnnnnnnnnnnnnnnnnnnnnnnnnnnnnnnnnnnnnnnnnnnnnnnnnnnnnnnnnnnnnnnnnnnnnnnnnnnnnnnnnnnnnnnnnnnnnnnnnnnnnnnnnnnnnnnnnnnnnnnnnnnnnnnnnnnnnnnnnnnnnnnnnnnnnnnnnnnnnnnnnnnnnnnnnnnnnnnnnnnnnnnnnnnnnnnnnnnnnnnnnnnnnnnnnnnnnnnnnnnnnnnnnnnnnnnnnnnnnnnnnnnnnnnnnnnnnnnnnnnnnnnnnnnnnnnnnnnnnnnnnnnnnnnnnnnnnnnnnnnnnnnnnnnnnnnnnnnnnnnnnnnnnnnnnnnnnnnnnnnnnnnnnnnnnnnnnnnnnnnnnnnnnnnnnnnnnnnnnnnnnnnnnnnnnnnnnnnnnnnnnnnnnnnnnnnnnnnnnnnnnnnnnnnnnnnnnnnnnnnnnnnnnnnnnnnnnnnnnnnnnnnnnnnnnnnnnnnnnnnnnnnnnnnnnnnnnnnnnnnnnnnnnnnnnnnnnnnnnnnnnnnnnnnnnnnnnnnnnnnnnnnnnnnnnnnnnnnnnnnnnnnnnnnnnnnnnnnnnnnnnnnnnnnnnnnnnnnnnnnnnnnnnnnnnnnnnnnnnnnnnnnnnnnnnnnnnnnnnnnnnnnnnnnnnnnnnnnnnnnnnnnnnnnnnnnnnnnnnnnnnnnnnnnnnnnnnnnnnnnnnnnnnnnnnnnnnnnnnnnnnnnnnnnnnnnnnnnnnnnnnnnnnnnnnnnnnnnnnnnnnnnnnnnnnnnnnnnnnnnnnnnnnnnnnnnnnnnnnnnnnnnnnnnnnnnnnnnnnnnnnnnnnnnnnnnnnnnnnnnnnnnnnnnnnnnnnnnnnnnnnnnnnnnnnnnnnnnnnnnnnnnnnnnnnnnnnnnnnnnnnnnnnnnnnnnnnnnnnnnnnnnnnnnnnnnnnnnnnnnnnnnnnnnnnnnnnnnnnnnnnnnnnnnnnnnnnnnnnnnnnnnnnnnnnnnnnnnnnnnnnnnnnnnnnnnnnnnnnnnnnnnnnnnnnnnnnnnnnnnnnnnnnnnnnnnnnnnnnnnnnnnnnnnnnnnnnnnnnnnnnnnnnnnnnnnnnnnnnnnnnnnnnnnnnnnnnnnnnnnnnnnnnnnnnnnnnnnnnnnnnnnnnnnnnnnnnnnnnnnnnnnnnnnnnnnnnnnnnnnnnnnnnnnnnnnnnnnnnnnnnnnnnnnnnnnnnnnnnnnnnnnnnnnnnnnnnnnnnnnnnnnnnnnnnnnnnnnnnnnnnnnnnnnnnnnnnnaggatccccataccatttgcgctctaatataccaccaacgagccattgacgccatcgctaggggccgtgtagccactggtggtgggctgctggtgggcaaggcgagaatcgggaccgaggccttctgcacggttgcaggctgcgtggggtggctcagcggacgtggctgggcatggcgataccatttgcgctctaattgaccgacaacgagccattggcgccatcgctagaggccgtgtagccactggtggtgggctgctggtggccaaggcgagaatcgggaccgaggccttctgcacggttgcaggctgcgtggggtggctcagcggatgtggctggccatggcgataccatttgcgcgctaatataccaccaacgagccattggcgccatcgctagaggccgtgtagccactggtggtgggctgctggtggccaaggcgagaatcgggaccgaggccttctgcacggttgcaggctgcgtggggtggctctgcggatgtggctggccatggcgataccatttgcgcgctaatataccaccaacgagccattggcgccatcgctagaggccgtgtagccactggtggtgggctgctggtgggcaaggcgagaatcgggaccgaggccttctgcacggttgcaggctgcgtggggtggctcagcggatgtggctggccatggcgataccatttgcgctctaatttaccaccaacgagccattggcgccatcgctagaggccgtgtagccactggtggtgggctgctggtgggcaaggcgagaatcgggaccgaggccttctgcacggttgcaggctgcgtggggtggctcagcggatgtggctggccatggcgataccatttgcgctctaattgaccaccaacgagccattggcgccatcgctagaggccgtgtagccactggtggtgggctgctggtggccaaggcgagaatcgggaccgaggccttctgcacggttgcaggctgcgtggggtggctcagcggatgtggctggtcatggcgataccatttgcgctctaattgaccgacaacgagccattggcgccatcgctagaggccgtgtagccactggtggtgggctgctggtggccaaggcgagaatcgggaccgaggccttctgcacggttgcaggctgcgtggggtggctcagcggatgtggctggccatggcgataccatttgcgctctaatttaccaccaacgagccattggcgccatcgctagaggccgtgtagccactggtggtgggctgctggtgggcaaggcgagaatcgggaccgaggccttctgcacggttgcaggccgcgtggggtggctcagcggatgtggctggccatggcgataccatttgcgctctaatttaccaccaacgagccattggcgccatcgctagaggccgtgtagccactggtggtgggctgctggtgggcaaggcgagaatcgggaccgaggccttctgcacggttgcaggctgcgtggggtggctcagcggatgtggctggccatggcgataccatttgcgctctaatttaccaccaacgagccattggcgccatcgctagaggccgtgtagccactggtggtgggctgctggtgggcaaggcgagaatcgggaccgaggccttctgcacggttgcaggccgcgtggggtggctcagcggatgtggctggccatggcgataccatttgcgctctaatttaccaccaacgagccaatggcgccatcactaggggccgtgtagccactggtggtgggctgctggtgggcaaggcgagaatcgggaccgaggccttctgcacggttgcaggccgcgtggggtggctcagcggatgtggctggccatggcgataccatttgcgctctaatttaccaccaacgagccattggcgccatcgctagaggccgtgtagccactggtggtgggctgctggtgggcaaggcgagaatcgggaccgaggccttctgcacggttgcaggctgcgtggggtggctcagcggatgtggctggccatggcgataccatttgcgctctaatttaccaccaacgagccattggcgccatcgctagaggccgtgtagccactggtggtgggctgctggtgggcaaggcgagaatcgggaccgaggccttctgcacggttgcaggctgcgtggggtggctcagcggatgtggctggccatggcgataccatttgcgctctaatttaccaccaacgagccattggcgccatcgctagaggccgtgtagccactggtggtgggctgctggtggccaaggcgagaatcgggaccgaggccttctgcacggttgcaggctgcgtggggtggctcagcggatgtggctggccatggcgataccatttgcgctctaatttaccaccaacgagccattggcgccatcgctagaggccgtgtagccactggtggtgggctgctggtggccaaggcgagaatcgggaccgaggccttctgcacggttgcaggctgcgtggggtggctcagcggatgtggctggccatggcgataccatttgcgctctaatttaccaccaacgagccattggcgccatcgctaggggccgtgtagccactggtggtgggctgctggtggccaaggcgagaatcgggaccgaggccttctgcacggttgcaggccgcgtggggtggctcagcggatgtggctggccatggcgataccatttgcgcactaatttaccaccaacgagccattggcgccatcgctaggggccgtgtagccactggtggtgggctgctggtgggcaaggcgagaatcgggaccgaggccttctgcacggttgcaggccgcgtggggtggctcagcggatgtggctggccatggcgataccatttgcgcactaatttaccaccaacgagccattggcgccatcgctagaggccgtgtagccactggtggtgggctgctggtgggcaaggcgagaatcgggaccgaggccttctgcacggttgcaggccgcgtggggtggctcagcggatgtggctggccatggcgataccatttgcgcactaatttaccannnnnnnnnnnnnnnnnnnnnnnnnnnnnnnnnnnnnnnnnnnnnnnnnnnnnnnnnnnnnnnnnnnnnnnnnnnnnnnnnnnnnnnnnnnnnnnnnnnnnnnnnnnnnnnnnnnnnnnnnnnnnnnnnnnnnnnnnnnnnnnnnnnnnnnnnnnnnnnnnnnnnnnnnnnnnnnnnnnnnnnnnnnnnnnnnnnnnnnnnnnnnnnnnnnnnnnnnnnnnnnnnnnnnnnnnnnnnnnnnnnnnnnnnnnnnnnnnnnnnnnnnnnnnnnnnnnnnnnnnnnnnnnnnnnnnnnnnnnnnnnnnnnnnnnnnnnnnnnnnnnnnnnnnnnnnnnnnnnnnnnnnnnnnnnnnnnnnnnnnnnnnnnnnnnnnnnnnnnnnnnnnnnnnnnnnnnnnnnnnnnnnnnnnnnnnnnnnnnnnnnnnnaggatcccctgtagccactggtggtgggctgctggtgggcaaggcgagaatcgggaccgaggccttctgcacggttgcaagccgcgtggggtggctcagcggatgtggctggccatggcgataccatttgcgcactaatttaccaccaacgagccattggcgccatcgctaggggccgtgtagccactggtggtgggctgctggtgggcaaggcgagaatcgggaccgaggccttctgcacggttgcaggccgcgtggggtggctcagcggatgtggctggccatggcgataccatttgcgcactaatttaccaccaacgagccattggcgccatcgctaggggccgtgtagccactggtggtgggctgctggtggccaaggcgagaatcgggaccgaggccttctgcacggttgcaggccgcgtggggtggctcagcggatgtggctggccatggcgataccatttgcgcactaatttaccaccaacgagccattggcgccatcgctagaggccgtgtagccactggtggtgggctgctggtgggcaaggcgagaatcgggaccgaggccttctgcacggttgcaggccgcgtggggtggctcagcggatgtggctggccatggcgataccatttgcgctctaatttaccaccaacgagccattggcgccatcgctagaggccgtgtagccactggtggtgggctgctggtgggcaaggcgagaatcgggaccgaggccttctgcacggttgcaggctgcgtggggtggctcagcggatgtggctggccatggcgataccatttgcgctctaatttaccaccaacgagccattggcgccatcgctagaggccgtgtagccactggtggtgggctgctggtgggcaaggcgagaatcgggaccgaggccttctgcacggttgcaggctgcgtggggtggctcagcggatgtggctggccatggcgataccatttgcgctctaatttaccaccaacgagccattggcgccatcgctagaggccgtgtagccactggtggtgggctgctggtgggcaaggcgagaatcgggaccgaggccttctgcacggttgcaggctgcgtggggtggctcagcggatgtggctggccatggcgataccatttgcgctctaatttaccaccaacgagccattggcgccatcgctagaggccgtgtagccactggtggtgggctgctggtggccaaggcgagaatcgggaccgaggccttctgcacggttgcaggctgcgtggggtggctcagcggatgtggctggccatggcgataccatttgcgctctaatttaccaccaacgagccattggcgccatcgctagaggccgtgtagccactggtggtgggctgctggtgggcaaggcgagaatcgggaccgaggccttctgcacggttgcaggccgcgtggggtggctcagcggatgtggctggccatggcgataccatttgcgctctaatttaccaccaacgagccaatggcgccatcgctaggggccgtgtagccactggtggtgggctgctggtgggcaaggcgagaatcgggaccgaggccttctgcacggttgcaggctgcgtggggtggctcagcggatgtggctggccatggcgataccatttgcgcactaatttaccaccaacgagccattggcgccatcgctagaggccgtgtagccactggtggtgggctgctggtggccaaggcgagaatcgggaccgaggccttctgcacggttgcaggctgcgtggggtggctcagcggatgtggctggccatggcgataccatttgcgctctaatttaccaccaacgagccattggcgccatcgctagaggccgtgtagccactggtggtgggctgctggtggccaaggcgagaatcgggaccgaggccttctgcacggttgcaggctgcgtggggtggctcagcggatgtggctggccatggcgataccatttgcgctctaatttaccaccaacgagccattggcgccatcgctaggggccgtgtagccactggtggtgggctgctggtggccaaggcgagaatcgggaccgaggccttctgcacggttgcaggctgcgtggggtggctcagcggatgtggctggccatggcgataccatttgcgctctaatttaccaccaacgagccattggcgccatcgctaggggccgtgtagccactggtggtgggctgctggtggccaaggcgagaatcgggaccgaggccttctgcacggttgcaggctgcgtggggtggctcagcggatgtggctggccatggcgataccatttgcgctctaatttaccacgaacgagccattggcgccatcgctagaggccgtgtagccactgctggtgggctgctggtggccaaggcgagaatcgggaccgaggccttctgcacggttgcaggctgcgtggggtggctcagcggatgtggctggccatggcgataccatttgcgctctaattgaccgacaacgagccattggcgccatcgctagaggccgtgtagccactggtggtgggctgctggtggccaaggcgagaatcgggaccgaggccttctgcacggttgcaggctgcgtggggtggctcagcggatgtggctggccatggcgataccatttgcgctctaatttaccaccaacgagccattggcgccatcgctagaggccgtgtagccactggtggtgggctgctggtggccaaggcgagaatcgggaccgaggccttctgcacggttgcaggccgcgtggggtggctcagcggatgtggctggccatggcgataccatttgcgctctaatttaccaccaacgagccattggcgccatcgctagaggccgtgtagccactggtggtgggctgctggtgggcaaggcgagaatcgggaccgaggccttctgcacggttgcaggccgcgtggggtggctcagcggatgtggctggccatggcgataccatttgcgctctaatttaccaccaacgagccattggcgccatcgctaggggccgtgtagccactggtggtgggctgctggtggccaaggcgagaatcgggaccgaggccttctgcacggttgcaggctgcgtggggtggctcagcggatgtggctggccatggcgataccatttgcgctcaaatttaccaccaacgagccattggcgccatcgctaagggccgtgtagccactggtggtgggctgctggtgggcaaggcgagaatcgggaccgaggccttctgcacggttgcaggctgcgtggggtggctcagcggatgtggctggccatggcgataccatttgcgctcaaatttaccaccaacgagccattggcgccatcgctaggggccgtgtagccactggtggtgggctgctggtgggcaaggcgagaatcgggaccgaggccttctgcacggttgcaggccgcgtggggtggctcagcggatgtggctggccatggcgataccatttgcgctctaatttaccaccaacgagccattggcgccatcgctaggggccgtgtagccactggtggtgggctgctggtggccaaggcgagaatcgggaccgaggccttctgcacggttgcaggctgcgtggggtggctcagcggatgtggctggccatggcgataccatttgcgctctaatttaccaccaacgagccattggcgccatcgctagaggccgtgtagccactggtggtgggctgctggtggccaaggcgagaatcgggaccgaggccttctgcacggttgcaggctgcgtggggtggctcagcggatgtggctggccatggcgataccatttgcgctcaaatttaccaccaacgagccattggcgccatcgctaggggccgtgtagccactggtggtgggctgctggtgggcaaggcgagaatcgggaccgaggccttctgcacggttgcaggccgcgtggggtggctcagcggatgtggctggccatggcgataccatttgcgctctaatttaccaccaacgagccattggcgccatcgctaggggccgtgtagccactggtggtgggctgctggtggccaaggcgagaatcgggaccgaggccttctgcacggttgcaggctgcgtggggtggctcagcggatgtggctggccatggcgataccatttgcgctctaatttaccaccaacgagccattggcgccatcgctagaggccgtgtagccactggtggtgggctgctggtggccaaggcgagaatcgggaccgaggccttctgcacggttgcaggctgcgtggggtggctcagcggatgtggctggccatggcgataccatttgcgctctaatttaccaccaacgagccattggcgccatcgctagaggccgtgtagccactggtggtgggctgctggtggccaaggcgagaatcgggaccgaggccttctgcacggttgcaggctgcgtggggtggctcagcggatgtggctggccatggcgataccatttgcgctctaatttaccaccaacgagccaatggcgccatcgctagaggccgtgtagccactggtggtgggctgctggtggccaaggcgagaatcgggaccgaggccttctgcacggttgcaggctgcgtggggtggctcagcggatgtggctggccatggcgataccatttgcgctctaatttaccaccaacgagccaatggcgccatcgctaggggccgtgtagccactggtggtgggctgctggtggccaaggcgagaatcgggaccgaggccttctgcacggttgcaggccgcgtggggtggctcagcggatgtggctggccatggcgataccatttgcgcactaatttaccaccaacgagccattggcgccatcgctagaggccgtgtagccactggtggtgggctgctggtggccaaggcgagaatcgggaccgaggccttttgcacggttgcaggccgcgtggggtggctcagcggatgtggctggccatggcgataccatttgcgctctaatttaccaccaacgagccattggcgccatcgctagaggccgtgtagccacaggtggtgggctgctggtggccaaggcgagaatcgggaccgaggccttctgcacggttgcaggccgcgtggggtggctcagcggatgtggctggccatggcgataccatttgcgcactaatttaccaccaacgagccattggcgccatcgctaggggccgtgtagccactggtggtgggctgctggtgggcaaggcgagaatcgggaccgaggccttctgcacggttgcaggccgcgtggggtggctcagcggatgtggctggccatggcgataccatttgcgcactaatttaccaccaacgagccaatggcgccatcgctaggggccgtgtagccacaggtggtgggctgctggtgggcaaggcgagaatcgggaccgaggccttctgcacagttgcaggccgcgtggggtggctcagcggatgtggctggccatggcgataccatttgcgcactaatttaccaccaacgagccattggcgccatcgctagaggccgtgtagccactggtggtgggctgctggtggccaaggcgagaatcgggaccgaggccttctgcacggttgcaggccgcgtggggtggctcagcggatgtggctggccatggcgataccatttgcgcactaatttacaccaacgagccattggcgccatcgctaggggccgtgtagccactggtggtgggctgctggtggccaaggcgagaatcgggaccgaggccttctgcacggttgcaggccgcgtggggtggctcagcggatgtggctggccatggcgataccatttgcgctctaattgaccgacaacgagccattggcgccatcgctaagggccgtgtagccactggtggtgggctgctggtggccaaggcgagaatcgggaccgaggccttctgcacggttgcaggctgcgtggggtggctcagcggatgtggctggccatggcgataccatttgcgcactaattgaccgacaacgagccattggcgccatcgctaggggccgtgtagccactggtggtgggctgctggtgggcaaggcgagaatcgggaccgaggccttctgcacggttgcaggccgcgtggggtggctcagcggatgtggctggccatggcgataccatttgcgctctaattgaccgacaacgagccattggcgccatcgctaggggccgtgtagccactggtggtgggctgctggtgggcaaggcgagaatcgggaccgaggccttctgcacggttgcaggccgcgtggggtggctcagcggatgtggctggccatggcgataccatttgcgctctaattgaccgacaacgagccattggcgccatcgctaggggccgtgtagccactggtggtgggctgctggtgggcaaggcgagaatcgggaccgaggccttctgcacggttgcaggctgcgtggggtggctcagcggatgtggctggccatggcgataccatttgcgcactaattgaccgacaacgagccattggcgccatcgctaggggccgtgtagccactggtggtgggctgctggtgggcaaggcgagaatcgggaccgaggccttctgcacggttgcaggccgcgtggggtggctcagcggatgtggctggccatggcgataccatttgcgcactaatttaccaccaacgagccattggcgccatcgctagaggccgtgtagccactgctggtgggctgctggtggccaaggcgagaatcgggaccgaggccttctacacggttgcaggctgcgtggggtggctcagcggatgtggctggccatggcgataccatttgcgcactaatttaccacgaacgagccattggcgccatcgctagaggccgtgtagccactgctggtgggctgctggtggccaaggcgagaatcgggaccgaggccttctgcacggttgcaggctgcgtggggtggctcagcggatgtggctggccatggcgataccatttgcgcactaattgaccgacaacgagccattggcgccatcgctagaggccgtgtagccactgctggtgggctgctggtggccaaggcgagaatcgggaccgaggccttctgcacggttgcaggctgcgtggggtggctcagcggatgtggctggccatggcgataccatttgcgctctaattgaccgacaacgagccattggcgccatcgctagaggccgtgtagccactggtggtgggctgctggtggccaaggcgagaatcgggaccgaggccttctgcacggttgcaggctgcgtggggtggctcagcggatgtggctggccatggcgataccatttgcgctctaattgaccgacaacgagccattggcgccatcgctagaggccgtgtagccactggtggtgggctgctggtggccaaggcgagaatcgggaccgaggccttctgcacggttgcaggctgcgtggggtggctcagcggatgtggctggccatggcgataccatttgcgctctaatttaccaccaacgagccattggcgccatcgctagaggccgtgtagccacaggtggtgggctgctggtggccaaggcgagaatcgggaccgaggccttttgcacggttgcaggctgcgtggggtggctcagcggatgtggctggccatggcgataccatttgcgctctaatttaccaccaacgagccattggcgccatcgctagaggccgtgtagccactggtggtgggctgctggtggccaaggcgagaatcgggaccgaggccttctgcacggttgcaggctgcgtggggtggctcagcggatgtggctggccatggcgataccatttgcgctctaatttaccaccaacgagccattggcgccatcgctagaggccgtgtagccactggtggtgggctgctggtggccaaggcgagaatcgggaccgaggccttctgcacggttgcaggctgcgtggggtggctcagcggatgtggctggccatggcgataccatttgcgctctaatttaccaccaacgagccattggcgccatcgctagaggccgtgtagccactggtggtgggctgctggtgggcaaggcgagaatcgggaccgaggccttctgcacggttgcaggctgcgtggggtggctcagcggatgtggctggccatggcgataccatttgcgcactaatttaccaccaacgagccattggcgccatcgctagaggccgtgtagccactggtggtgggctgctggtgggcaaggcgagaatcgggaccgaggccttctgcacggttgcaggccgcgtggggtggctcagcggatgtggctggccatggcgataccatttgcgcactaatttaccaccaacgagccattggcgccatcgctagaggccgtgtagccactggtggtgggctgctggtggccaaggcgagaatcgggaccgaggccttctgcacggttgcaggctgcgtggggtggctcagcggatgtggctggccatggcgataccatttgcgctctaatttaccaccaacgagccattggcgccatcgctagaggccgtgtagccactggtggtgggctgctggtggccaaggcgagaatcgggaccgaggccttctgcacggttgcaggctgcgtggggtggctcagcggatgtggctggccatggcgataccatttgcgctctaatttaccaccaacgagccattggcgccatcgctagaggccgtgtagccactggtggtgggctgctggtggccaaggcgagaatcgggaccgaggccttctgcacggttgcaggctgcgtggggtggctcagcggatgtggctggccatggcgataccatttgcgctctaatttaccaccaacgagccattggcgccatcgctagaggccgtgtagccactggtggtgggctgctggtggccaaggcgagaatcgggaccgaggccttctgcacggttgcaggctgcgtggggtggctcagcggatgtggctggccatggcgataccttttgcgctctaatttaccaccaacgagccaatggcgccatcgctaggggccgtgtagccactggtggtgggctgctggtgggcaaggcgagaatcgggaccgaggccttctacacggttgcaggctgcgtggggtggctcagcggatgtggctggccatggcgataccatttgcgcactaatttaccaccaacgagccattggcgccatcgctaggggccgtgtagccactggtggtgggctgctggtggccaaggcgagaatcgggaccgaggccttctgcacggttgcaggctgcgtggggtggctcagcggatgtggctggccatggcgataccatttgcgctctaattgaccgacaacgagccattggcgccatcgctaggggccgtgtagccacaggtggtgggctgctggtgggcaaggcgagaatcgggaccgaggccttctgcacggttgcaggctgcgtggggtggctcagcggacgtggctggccatggcgataccatttgcgctctaattgaccgacaacgagccattggcgccatcgctaggggccgtgtagccacaggtggtgggctgctggtgggcaaggcgagaatcgggaccgaggccttctgcacggttgcaggccgcgtggggtggctcagcggatgtggctggccatggcgataccatttgcgctctaatttaccacgaacgagccattggcgccatcgctagaggccgtgtagccactgctggtgggctgctggtggccaaggcgagaatcgggaccgaggccttctgcacggttgcaggctgcgtggggtggctcagcggatgtggctggccatggcgataccatttgcgctctaatttaccaccaacgagccattggcgccatcgctagaggccgtgtagccactggtggtgggctgctggtgggcaaggcgagaatcgggaccgaggccttctgcacggttgcaggctgcgtggggtggctcagcggatgtggctggccatggcgataccatttgcgctctaatttaccaccaacgagccattggcgccatcgctagaggccgtgtagccactggtggtgggctgctggtgggcaaggcgagaatcgggaccgaggccttctgcacggttgcaggccgcgtggggtggctcagcggatgtggctggccatggcgataccatttgcgctctaatttaccaccaacgagccattggcgccatcgctagaggccgtgtagccactggtggtgggctgctggtgggcaaggcgagaatcgggaccgaggccttctgcacggttgcaggccgcgtggggtggctcagcggatgtggctggccatggcgataccatttgcgctctaatttaccaccaacgagccattggcgccatcgctaggggccgtgtagccactggtggtgggctgctggtgggcaaggcgagaatcgggaccgaggccttctgcacggttgcaggctgcgtggggtggctcagcggatgtggctggccatggcgataccatttgcgctctaatttaccaccaacgagccattggcgccatcgctagaggccgtgtagccactggtggtgggctgctggtgggcaaggcgagaatcgggaccgaggccttctgcacggttgcaggccgcgtggggtggctcagcggatgtggctggccatggcgataccatttgcgctctaatttaccaccaacgagccattggcgccatcgctagaggccgtgtagccactggtggtgggctgctggtggccaaggcgagaatcgggaccgaggccttctgcacggttgcaggctgcgtggggtggctcagcggatgtggctggccatggagataccatttgcgcactaattgaccgacaacgagccattggcgccatcgctaggggccgtgtagccactggtggtgggctgctggtggccaaggcgagaatcgggaccgaggcctcctgcacggttgcaggctgcgtggggtggctcagcggatgtggctggccatggcgataccatttgcgctctaatttaccaccaacgagccattggcgccatcgctagaggccgtgtagccactggtggtgggctgctggtggccaaggcgagaatcgggaccgaggccttctgcacggttgcaggctgcgtggggtggctcagcggatgtggctggccatggagataccatttgcgcactaattgaccgacaacgagccattggcgccatcgctaggggccgtgtagccacaggtggtgggctgctggtggccaaggcgagaatcgggaccgaggccttctgcacggttgcaggccgcgtggggtggctcagcggatgtggctggccatggcgataccttttgcgctctaatttaccaccaacgagccaatggcgccatcgctaggggccgtgtagccactggtggtgggctgctggtgggcaaggcgagaatcgggaccgaggccttctacacggttgcaggctgcgtggggtggctcagcggatgtggctggccatggcgataccatttgcgcactaatttaccaccaacgagccattggcgccatcgctagaggccgtgtagccactggtggtgggctgctggtgggcaaggcgagaatcgggaccgaggccttctgcacggttgcaggctgcgtggggtggctcagcggatgtggctggccatggcgataccatttgcgctctaatttgccaccaacgagccattggcgccatcgctaggggccgtgtagccacaggtggtgggctgctggtggccaaggcgagaatcgggaccgaggccttctgcacggttgcaggccgcgtggggtggctcagcggatgtggctggccatggcgataccatttgcgctctaatttaccaccaacgagccaatggcgccatcgctaggggccgtgtagccaccggtggtgggctgctggtgggcaaggcgagaatcgggaccgaggccttctgcacggttgcaggccgcgtggggtggctcagcggatgtggctggccatggcgataccatttgcgctctaatttaccaccaacgagccaatggcgccatcgctaggggccgtgtagccactggtggtgggctgctggtgggcaaggcgagaatcgggaccgaggccttctgcacggttgcaggctgcgtggggtggctcagcggatgtggctggccatggcgataccatttgcgctctaatttaccacgaacgagccattggcgccatcgctagaggccgtgtagccactggtggtgggctgctggtggccaaggcgagaatcgggaccgaggccttctgcacggttgcaggctgcgtggggtggctcagcggatgtggctggccatggcgataccatttgcgcactaatttaccacgaacgagccattggcgccatcgctaggggccgtgtagccactggtggtgggctgctggtggccaaggcgagaatcgggaccgaggccttctgcacggttgcaggccgcgtggggtggctcagcggatgtggctggccatggcgataccatttgcgctctaatttaccacgaacgagccattggcgccatcgctaggggccgtgtagccactggtggtgggctgctggtggccaaggcgagaatcgggaccgaggccttctgcacggttgcaggccgcgtggggtggctcagcggatgtggctggccatggcgataccatttgcgcactaatttaccaccaacgagccaatggcgccatcgctaggggccgtgtagccacaggtggtgggctgctggtgggcaaggcgagaatcgggaccgaggccttctgcacggttgcaggctgcgtggggtggctcagcggacgtggctggccatggcgataccatttgcgctctaattgaccgacaacgagccattggcgccatcgctagaggccgtgtagccactggtggtgggctgctggtgggcaaggcgagaatcgggaccgaggccttctgcacggttgcaggctgcgtggggtggctcagcggatgtggctggccatggcgataccatttgcgctctaatttaccaccaacgagccattggcgccatcgctagaggccgtgtagccactggtggtgggctgctggtgggcaaggcgagaatcgggaccgaggccttctgcacggttgcaggccgcgtggggtggctcagcggatgtggctggccatggcgataccatttgcgctctaatttaccaccaacgagccattggcgccatcgctagaggccgtgtagccactggtggtgggctgctggtggccaaggcgagaatcgggaccgaggccttctgcacggttgcaggctgcgtggggtggctcagcggatgtggctggccatggcgataccatttgcgctctaatttaccaccaacgagccattggcgccatcgctagaggccgtgtagccactggtggtgggctgctggtggccaaggcgagaatcgggaccgaggccttctgcacggttgcaggctgcgtggggtggctcagcggatgtggctggccatggcgataccatttgcgctctaatttaccaccaacgagccattggcgccatcgctaggggccgtgtagccactggtggtgggctgctggtgggcaaggcgagaatcgggaccgaggccttctgcacggttgcaggctgcgtggggtggctcagcggatgtggctggccatggcgataccatttgcgctctaatttaccaccaacgagccattggcgccatcgctagaggccgtgtagccactggtggtgggctgctggtggccaaggcgagaatcgggaccgaggccttctgcacggttgcaggctgcgtggggtggctcagcggatgtggctggccatggcgataccatttgcgctctaatttaccaccaacgagccattggcgccatcgctagaggccgtgtagccactggtggtgggctgctggtggccaaggcgagaatcgggaccgaggccttctgcacggttgcaggctgcgtggggtggctcagcggatgtggctggccatggagataccatttgcgcactaattgaccgacaacgagccattggcgccatcgctaggggccgtgtagccacaggtggtgggctgctggtggccaaggcgagaatcgggaccgaggccttctgcacggttgcaggccgcgtggggtggctcagcggatgtggctggccatggcgataccttttgcgctctaatttaccaccaacgagccaatggcgccatcgctaggggccgtgtagccactggtggtgggctgctggtgggcaaggcgagaatcgggaccgaggccttctacacggttgcaggctgcgtggggtggctcagcggatgtggctggccatggcgataccatttgcgcactaatttaccaccaacgagccattggcgccatcgctagaggccgtgtagccactggtggtgggctgctggtggccaaggcgagaatcgggaccgaggccttctgcacggttgcaggctgcgtggggtggctcagcggatgtggctggccatggcgataccatttgcgctctaatttaccaccaacgagccattggcgccatcgctagaggccgtgtagccactggtggtgggctgctggtggccaaggcgagaatcgggaccgaggccttctgcacggttgcaggctgcgtggggtggctcagcggatgtggctggccatggcgataccatttgcgctctaatttaccaccaacgagccattggcgccatcgctagaggccgtgtagccactggtggtgggctgctggtggccaaggcgagaatcgggaccgaggccttctgcacggttgcaggccgcgtggggtggctcagcggatgtggctggccatggcgataccatttgcgctctaattgaccgacaacgagccattggcgccatcgctagaggccgtgtagccactggtggtgggctgctggtggccaaggcgagaatcgggaccgaggccttctgcacggttgcaggctgcgtggggtggctcagcggacgtggctggccatggcgataccatttgcgctctaatttaccaccaacgagccattggcgccatcgctagaggccgtgtagccactggtggtgggctgctggtggccaaggcgagaatcgggaccgaggccttctgcacggttgcaggctgcgtggggtggctcagcggacgtggctggccatggcgataccatttgcgctctaattgaccgacaacgagccattggcgccatcgctagaggccgtgtagccactggtggtgggctgctggtggccaaggcgagaatcgggaccgaggccttctgcacggttgcaggctgcgtggggtggctcagcggacgtggctggccatggcgataccatttgcgctctaatttaccaccaacgagccattggcgccatcgctagaggccgtgtagccactggtggtgggctgctggtgggcaaggcgagaatcgggaccgaggccttctgcacggttgcaggctgcgtggggtggctcagcggatgtggctggccatggcgataccatttgcgctctaatttaccaccaacgagccattggcgccatcgctaggggccgtgtagccactggtggtgggctgctggtggccaaggcgagaatcgggaccgaggccttctgcacggttgcaggccgcgtggggtggctcagcggatgcggctggccatggcgataccatttgcgctctaattgaccgacaacgagccattggcgccatcgctagaggccgtgtagccactggtggtgggctgctggtgggcaaggcgagaatcgggaccgaggccttctgcacggttgcaggccgcgtggggtggctcagcggatgtggctggccatggcgataccatttgcgctctaatttaccaccaacgagccattggcgccatcgctagaggccgtgtagccactggtggtgggctgctggtgggcaaggcgagaatcgggaccgaggccttctgcacggttgcaggccgcgtggggtggctcagcggatgtggctggccatggcgataccatttgcgctctaatttaccaccaacgagccattggcgccatcgctaggggccgtgtagccactggtggtgggctgctggtggccaaggcgagaatcgggaccgaggccttctgcacggttgcaggccgcgtggggtggctcagcggatgtggctggccatggcgataccatttgcgctctaatttaccaccaacgagccattggcgccatcgctagaggccgtgtagccactggtggtgggctgctggtggccaaggcgagaatcgggaccgaggccttctgcacggttgcaggccgcgtggggtggctcagcggatgtggctggccatggcgataccatttgcgctctaatttaccaccaacgagccattggcgccatcgctaggggccgtgtagccactggtggtgggctgctggtggccaaggcgagaatcgggaccgaggccttctgcacggttgcaggccgcgtggggtggctcagcggatgtggctggccatggcgataccatttgcgctctaatttaccgccaacgagccattggcgccatcgctagaggccgtgtagccactggtggtgggctgctggtgggcaaggcgagaatcgggaccgaggccttctgcacggttgcaggctgcgtggggtggctcagcggatgtggctggccatggcgataccatttgcgctctaatttaccaccaacgagccattggcgccatcgctaagggccgtgtagccactggtggtgggctgctggtgggcaaggcgagaatcgggaccgaggccttctgcacggttgcaggccgcgtggggtggctcagcggatgtggctggccatggcgataccatttgcgctctaatttaccaccaacgagccattggcgccatcgctaggggccgtgtagccactggtggtgggctgctggtggccaaggcgagaatcgggaccgaggccttctgcacggttgcaggctgcgtggggtggctcagcggatgtggctggccatggcgataccatttgcgctctaatttaccaccaacgagccattggcgccatcgctaaaggccgtgtagccactggtggtgggctgctggtggccaaggcgagaatcgggaccgaggccttctgcacggttgcaggctgcgtggggtggctcagcggatgtggctggccatggcgataccatttgcgctctaattgaccgccaacgagccattggcgccatcgctaaaggccgtgtagccactggtggtgggctgctggtggccaaggcgagaatcgggaccgaggccttctgcacggttgcaggctgcgtggggtggctcagcggatgtggctggccatggcgataccatttgcgcactaattgaccgacaacgagccattggcgccatcgctagaggccgtgtagccactgctggtgggctgctggtggccaaggcgagaatcgggaccgaggccttgtgcacggttgcaggctgcgtggggtggctcagcggatgtggctggccatggcgataccatttgcgctctaattgaccgacaacgagccattggcgccatcgctagaggccgtgtagccactggtggtgggctgctggtggccaaggcgagaatcgggaccgaggccttctgcacggttgcaggctgcgtggggtggctcagcggatgtggctggccatggcgataccatttgcgcactaatttaccaccaacgagccaatggcgccatcgctagaggccgtgtagccactggtggtgggctgctggtggccaaggcgagaatcgggaccgaggccttctgcacggttgcaggctgcgtggggtggctcagcggacgtggctagccatggcgataccatttgcgctctaattgaccgccaacgagccattggcgccatcgctagaggccgtgtagccactggtggtgggctgctggtgggcaaggcgagaatcgggaccgaggcctcctgcacggttgcaggctgcgtggggtggctcagcggatgtggctggccatggcgataccatttgcgctctaatttaccaccaacgagccattggcgccatcgctagaggccgtgtagccactggtggtgggctgctggtggccaaggcgagaatcgggaccgaggccttctgcacggttgcaggccgcgtggggtggctcagcggatgtggctggccatggcgataccatttgcgcactaatttaccaccaacgagccattggcgccatcgctagaggccgtgtagccactggtggtgggctgctggtgggcaaggcgagaatcgggaccgaggcctcctgcacggttgcaggctgcgtggggtggctcagcggatgtggctggccatggcgataccatttgcgctctaatttaccaccaacgagccattggcgccatcgctagaggccgtgtagccactggtggtgggctgctggtgggcaaggcgagaatcgggaccgaggccttctgcacggttgcaggctgcgtggggtggctcagcggatgtggctggccatggcgataccatttgcgcactaatttaccaccaacgagccattggcgccatcgctagaggccgtgtagccactggtggtgggctgctggtgggcaaggcgagaatcgggaccgaggccttctgcacggttgcaggctgcgtggggtggctcagcggatgtggctggccatggcgataccatttgcgctctaatttaccaccaacgagccattggcgccatcgctagaggccgtgtagccactggtggtgggctgctggtgggcaaggcgagaatcgggaccgaggccttctgcacggttgcaggctgcgtggggtggctcagcggatgtggctggccatggcgataccatttgcgctctaatttaccaccaacgagccattggcgccatcgctagaggccgtgtagccactggtggtgggctgctggtggccaaggcgagaatcgggaccgaggccttctgcacggttgcaggctgcgtggggtggctcagcggatgtggctggccatggcgataccatttgcgctctaatttaccaccaacgagccattggcgccatcgctaggggccgtgtagccactggtggtgggctgctggtgggcaaggcgagaatcgggaccgaggccttctgcacggttgcaggctgcgtggggtggctcagcggatgtggctggccatggcgataccatttgcgctctaatttaccaccaacgagccattggcgccatcgctaggggccgtgtagccactggtggtgggctgctggtgggcaaggcgagaatcgggaccgaggccttctgcacggttgcaggctgcgtggggtggctcagcggatgtggctggccatggcgataccatttgcgcactaatttaccaccaacgagccattggcgccatcgctagaggccgtgtagccactggtggtgggctgctggtggccaaggcgagaatcgggaccgaggccttctgcacggttgcaggctgcgtggggtggctcagcggatgtggttggccatggcgataccatttgcgctctaatttaccaccannnnnnnnnnnnnnnnnnnnnnnnnnnnnnnnnnnnnnnnnnnnnnnnnnnnnnnnnnnnnnnnnnnnnnnnnnnnnnnnnnnnnnnnnnnnnnnnnnnncctatacctttttcatgctatcgttgcgtctggtctgatgcgattgcccaggggccctccttcgttgtggtgcgtggctcgcactctcacttcgacagatagcacactgcagccatggttggtgaagtagttgtgttgcgactacattgttgccgtcctaagcgacgccaccttcgtactacagtagtggtcaagtggatatccccgcagttccggaccggcacatagaatggccgttccaggtacctctgtttaccggttgttgccttgtaaagcgctgtgacccgaccaagaaagcgcttgccgctaagttagctaccgagtacagtaacgcagataatggactgcagtctcggaggttttactagaaactaagatgaagagaggtctttcgttttctcattcattgccgttgtggctttttctttcaaaaccacccacggaacacctgtttttgctctcactgagctgaggatggcatgttaaccagcgatttgaatatgctttgtttgtgttaagagattgctatgaaatgaaatcaaatcctcggaaatcgtatttcgcattttatctgttaacgtgaggtacagcaattaaaatattgattacggaaatccgttttggggttaatttaacacttatttggtttggggtccgttatctaactgatgtgttaaattgagcgttctatttagctgtaataaaagatatttttgaggacgctaaggagtgggagactatgggtgctgcttaattctaggcgtagctactgacacgcttctgggtcagtagagcgcgaaatttagcggtgcacggagcgtctttcattcgtctggctctcccgtataaaacccccttatttgtaagcttcagattctatcaattaaaccctttgatttgaaaattagaatgaacaaatctaggattgaaatggagcggtacaaatgcatcacgagtatttcgaagcgtctgtcatttcaaggcaatcacttcaagcgaacttctctcacgcgtacttcctgatggtcttgatgagacctcgcagcgagtcggtcggcgtcgacttctccggcaggaaccacgagcgccacaggtactcatcgaggtaactccggaatcatgtccaccggcatgccgcgcatgcgcttgatgtgctgcttgatccggatctcccacgtgccctcaattcggttcgtgtgggcgccggtgtccgggtcgacgtagtttttcgagtggttgacccactcgtgtttgtacaccattgtgcggcctacttcgtaccaacgtgcaatcaaatccgtaagtcgcaaaattcgatttgcaaatttctagttagcaacttcaattacgcattcaaagatggaattacggcaatcaaattcgcacagtaggctacaactactggtccgacgagccctgttacatgccgtacaccatgtcctcgttgatcgccgccttggtgacgaagtcgcgacaatgcagctccatactggccatcagcgctggggtcatcacgttcatgttagcggtcgcggcgcgctccaggatgtgcatctggcgttccgaaatggagaggatctcaccgttactgtctggctcacgcgagcgatcgtagattgcgtggtgatccagagccaagtctcgcttaatgcgggatattaagacgctgcttctcgaggacggtgtggcgagtaacgctgccttggagggacatctgacttcaattacgcattcaaagatggaattacagcaatcaaagttggaccagaggtccaagatctccatggctacgtaagctggcgtgctgtgctcgcgccaaaaccaagggcgcgcggtttggcgcgcactatagccgacgccgaccgaggggagctcacttcgcaattcgccttcttcttcgtgctaactaaaaatttgtgaattttacgactttcggatttgattgcacgttggtacgaagtaggccgcacaaaggtgtagtgcatctcacgcagcggctggtagttggcaagcatttgcttctgtttcagcgagacgtacgacgcgtactggtcggcccggtgccctcacggaggtaaacttcgagtcgcgcatgtacccctcgcaatatcataatatattctttgaaaaaggttattaacagacgacaaccgagcaagggctaacgacaggtggacaggggctggagagacacaacagccgaagagtgctcaagtaacaggtgataaatatcacccgacgggcgtcctcgagcacgaaaagcgcagcaagcgtacacccttgcgcagtggcagcttgcacttgctgaagaacgtgtctttgatcagactgcgctcggtgcgacacttggtgcgaccacagcgccaccgcttgcgcccgatgtcaagacgcaagtcttggtggcactttgtacacagctgtgaggttggcaataaccccaccgccatgcaccagcggaccttggcctcgctgtccgctgtcttgtccagcaccgacatgtacgtcgtctgcagcaacgccacggacgacggactcggaagcatgatgcacgacgcgtccgtgctggcgtcgctcgcgatcgcggtgttcatggtggtgagcttcgggcggcgagtggggcggctcggcatcttgaaggtgaagggagtttgggcttgggcgacttgagctggagaaggttaattccggaatgacttgtgtgccttcgcggcttatttggcgcgaaaatgtgggggagcccccacagacggcctttcgggatcgacccgttttgtggggtgataacgacccctgcgatcacctcggtcgtactagttgtattcctgcttggctcagatttctaaattctgaagcttagaattaagggggttttatacgggagagcccattcgtcttaaaaaatcagtcgctgggttcaacttaactcccaatttcgagtcaaagctttggttgacatgtaagcgcaagtgtgtgtgtctaatcggcctttagaataaggcgcagaacaccttcaatgctcaataaaacgctcaacgtaacaaatcagttagatagcggaccccaaaccggatttcccctattaattatggttggatagtaaaaacaaaatagatcctaggggaaattccgcaatgtgatacaaaatgcaaatttaggcaaaaggtaatacaaggatttgtggcgagagcaaacttctcaggttcagcagcattagggcattgggccgcggtattgttacctccagcggcgacataaggagtaagaaccttactgtaaggcatccatgccgtcggcggttgcttcatgcagcgcgggcagtgtcgctcaagcgatgcagaaggccaccatactcgggcagtacaactatcaccagagggcgttgcctacaccggcacagccttcgccacatttacctagtgctacactgatacaattgatgcatcagcaacgtgcatggcattcgcgggctgcctgctatcgacggccaaatgcacttggcacaaatccttgtaccactacaacttttaacttttgcacatttttttcattttgtatcacattccggaattttccctagatcctactactaacaagcgattcaatataatactgaattggatctaccggtggtagatggcagcaacgtacctgccaggaagtgcaaccaatcatgacaccagtgaacacgaatctacgacaagacgcaaatctgccttgtttgtcgattaaatctgtacataccgctcaaagaacacgaggtgtcaaattgtgaccaaggtggaatgaccaacgctaggagattagtatatttttagtttaaggttgttaacaaatctcctcgtttgcttggcacactgcgggagcatctttggtcttctccgattcggcgtctagtgccgctttcgacgatcaccgctgaaaaagtccttctccctcttttcgtaggccgcctgcttggcgagccgttgttgaagcatgcgcaaccggaagtcgtcgtaccgcgcagagagtggctggggaccgccggcctccgcactccacatcgatgaagtcaccattacgagcaccataagaagcaggacgcgctgggagaagttcatgtctgaggcttggtcgttgcttgaaaggcgactttctctgagggggcttgagtgctcgagagcttgtttcgaagtggggaaggctggggcaagactccatctccagccactcgtcctcgaagccgcacaccagagcgcacagataagaccgtgcgcccaatttgtactaccatagcatttaaaattatccggggtctacgagccaattggatgcggctgcacatttaagaaaatcaaccggcaagagctaatcatagcctcgcgcgttgctgacatgaatgctttggtagaacccttccaaaacgatagggaatgctttcctcgacacagtcaccttttcaactaaaaagctgacgacatagagaatgttgaggactgcatcacaagtttattatcgccagcaatacacgtggtcagtcgtggctgcataggcgcatttgaagctcactttaccattgaactccatctcgacgagtgagtcgaattgcgagtaggcgtgctgtcgtctatgacaaaccacagcacttacaaaaacaggagaaaacatcttcatttgattcacagtcccgatctctttttaagtaaaatgatgtcgagctcgcagcagccacaagacacgcaaaaggtgcaaaaatcaacgacaacaaatacttgcgagcactgcagccaagttcgcggtagcccttacaggttgtgattgctcctaccgacttgcaggttactcataatgccgttgagtttggccagcagcaaatcaatccagtagttgtgttcgatgggaagcggtttgcccgtttcggcgccgggtggctaggagagctctgaattcataaacggcgggtagatagtcttggcgttctttcctgaccagtcaaagtcaataagaacgactcgaccgtttaccgcatctcacatgacgttgcagttgcgaagatctccgtgaacatagtcagcagcagcaagcttcttcttgatcgatctcagttgtgaaagcacgggtgttagaggagctcgcacgagtggggccagcaccaaactctccatcacaacaaacacccaaccgttaacaagaatttcgtgatacagcaattttggagcgaagcccttgtccgcgcaatacaggtgcacatcacgaccgtattgtttggcgaacttgacgatgactttggtctgcgatggagcgagttgcgcactgaacacgttgcgaaccagcgcagccttatacaacaacttcacttcttcgccatcgatcaacgctgtatctttgtaagggaacgcgaatcgtgaaacatcgcttgccacggcttgcgtgtccgcttcttgaagctctctggttagctcgtgcagcgcagctttcaatgaagcacaaacacgagccggtggtgccatcagcggggtgtcgaaataaagcaacggaagactagccaccagtggctcgcacacgacagcttcgtcaccaatgttgatgatgccgaaaacacttaggagcggtccgcagatgagctcattttgtactagcatttaaatttatccggtgtctacgagcccatggagctgctgctgctaccctggctaccacggttccggttgcggcggttgttgttgccagcaggtggtggcgggcttggtgtgtccgtcgtctctggtggcacgtaagccatcatgcggatccaacgacggcgacgcactgaagcacccaggcgcttcatgctggacttgccgcgagccaagtgaaacttgaaccgagggaagtcggtagcataactccacccttcgtcatcgcaatccgtgtagttcttgtcaattcgccaaggtgtcgtccagctccagtgaggaggcagggaaacctgctcgaagctcatcgccttgtcaccctctcgattcgagaagcgcggtcggtctgtcggcagcaggtggtttggcgcccactttccaaacatgctcacacgctggttttcgaaaatctcctctagtgccacacttccatccagggtgctgttgtaacgagtgacgctcggccggcgacgagacacaacccccggggatgaactccttcgcgggcgggcagcagctccgccgccttgctcagcacctccagaaggacgagcggcatcggatgcactggaagtctcctctgcatccaacgccttcttgagtccctcaaaaaccatcttcgtactcttcacaacaccctctttggtcgcagacatgatctttgacttgaacatcgtgctctttgaaaacgggatcccaatgtacactttggcggcaaggggcgatccaatggcatcggtgcggggctcgatcacatacactgtttcaacatggaaacagtctccatagggaatttcaagcagcgtcagtttgtgctcgatgacgacccgatcagtatccaaactgtcgcggtcctgcgacgagaagggtacgtgcacaagctgctctgccatcgtcgaagacggcccaagaggcgagttgcttttagcgcggtatttcatctcccgcacctgcccgccatactccgccgaatcctcccacttccccacaacgtgctccgtgtcccccgcctctttatggatattttgccaccgcgacatagtgttgtctgcgtagaataggtcgaagaagtgaagtccatccttgatagcagggtgcaggtcgtactcgccaacaacctgtcgctcctcttcggaagacatcaaaaatggtttcgcaggcgctgcagacgcggatgcacttggattttccaacgaccggttcaccacgtggaaatacaaacgtgaggagctaaccatagcttcacgcgttgccgagatgatcttcgatttgaacatacagcccttggaaaacggtacacccaggtaaatcttcgccactagctggccaggactgccatcgctggaggggacgcgctccacaacagtcaccttttcaactgagaagcagtctccatagggaatgtcgtgcataaccaccttcgactgcatcacaagcttttcgctgccatcaataccgccttcgtcgaaaggcacatggtctgtcgtggttgtcatagtgtgcgatggcccgattgaagcattggtgggtgagcggcagctcatcgttcgcacttgaccaccaaactccttcgacggactccattccccgacctcaatctccgagtcgccacgctccttgtagtattcactcaagcggtctgaagtgtcattcgccaagaagttcttgaaaaagtcgtagggtgtcgttaacgaagcgtggagtgggtattcgccaacaagctcgcgctcatcggcagaggtaacgaggaactgcatcagctctgcaccgccagcattgtccaccgagtatttcagcgagagcatcaattgtcccaggatggcatcacgagtagacgtcaccggccacgcacaagtaaactgtgctgtgcgcatacccgtgaagcccagcagctcgcgcagagagagggacacctcgccaattttcgtggtaagatagcgcaaatggatctcgtacacgtgcagcaccataatgtcgggcaggccgcaaaaggcgccggacgtcgcaccaagcgcgcgacactcctggcactccgagcacaagtggtcctggaaatgccacgtcagcttctcgttccatttcaccacagctcctttctcgcccttctcgcctcggggcttgggggacgtctgccccacgggcacgctcgagtagtcgtgcagctcggacttgaacttggccaccacgtagaactgccgcagcgacgcgtccttgtcgtaactcatgtcctgcaccagcagctccagcgcgtgagatttcagtcgcaccggggggacttcggcatcttctccggagctgcccagcagattgagagcactggccgtggcgctcaacgcgttgaacccattttcactcgagtcgtgcagcttcagcgtcgaagacgagggcggaggagcaccgccgttggatgccagcgccgcctgcgacggaacaggcgctacggcagcactgagcacgctgtcgatccggcctggcacgtggccctggatggcgcgcatcgtcagcacgcagagccacgagcgcgcagccatgtcgtcctccgctctgaaaaagtaggtgccgcccagcgtgcctcggatctcgagcgtattggccccgaactcgaaggggtcggcgggtttcacggcgtgcaccgccagcgaccccttgacgttcgtgttgcgtctcgccgcgtctgcgttcgggtagtacttgatcctcgcgtgcgcgtccagcaccacgaagcgcttcttccagtgcttgccgcgctgcaggcccttcttgaccagtagccagccgtccagcggcgcgtctcccagctccacaatggcctccacgaactcctgcttgttggccacagtgtcggcgaagaagggcatcgagtagtacgtggagcggcgcggcaggcgcgcgcgggtctcgcgctccaggcggtcgcgcacactggccgcgcgcttcacggggtgtttctctgtggccttgaggctgcgcggggcctcggggctggccgcgccggcgctgctgccgccgctggagccctgcgcgggcatggggaacacggtgaacagcacgcggaagagcacgacgcagagcgcgagccccacggtcaccaccatgaagaggtcgaggaacgcgtgcgcattgccgcccagcgggtcgctcgggggcacgcacgtctcctccatgcgctgcgctgcgggggtcaggtcaggtggccttctccttcgttgacttgtcttggcgacggattcggcagtgcgcggcttacgctgggcggggcgctcggagattacccgccgctgctgacgacgcctacgacacgtacgttggcgccgatcacttgaggtttgtatgggccagaccagtgtatctggacgggttcatggcctttttgcgtctagacccatcaaacagcataccgagcaattggatagtttgccgtaaccacacctttggatttatcattcatcactttgcctgcagctgcgggcggctccgacgatacttagtatatgtagccaagcaccatcgtcatgcccggcagcaccgataggatatccatgcatatgtatcctggatcgaggcgggtgggagagcaaattaaagttttgtagctgatactttagcgtcgccttgttgccatggagatgcaaatgtgttgacgacaactacgaacatgtggtgggtcgtccacggttgctttgccgtgttgactccagcggtggagtcatcacagcggcggcggctgcgagtgtaaggtcttactgtaggcaggaaagcgggaaacgatagcttcgatgcagtagctttggctaactacatgtaaaagcagtcggtcgatcttgtcaagtgcagaggcttttttcatcatgtgaagactaaatgtatctatccgcgcgtttgccaacccaaccagtacatttttttgcgaatcggttgagccgatggatccactgagatcaactttaccttgatcgacggaagaggccttggcggcaagaacacggttgggcccgcgcgctgaagggatcctcggcagttttccgggcgagctgacctctgaaactggccgacaccagcgcggttgaagaccgaagagcagttgttgtgaaagctggtcaacgcgtgcaaaagcagccctggactcggcgccacgaacagcgagagccggcaccaagctcctggctgcgctaatggcagtctgctatggacggctttggacatctccttcagcccagcattgcattgacgttgcagacagacagaagtcttgggacttgactgggcgcgagtcctcggaatacaaactccaagtgttttccgcccctgcgatcgatcggggagagagacgaggggtcgctccggcctcattcatcataagactttgcaagagagaagaagaacccgcatgcggcgcgacttgtcccgagagcgcgtcttcttcctgctcgtgctggccgctgggctgctggtgctgtcgggcctcatgctgcgccacgagagcgccgtgctgcccgcgcgcaccttccgcgatggcttcacggtggccgagggcgtggtacggcgcgcggagatggtcgcggccaccaacgcgtcggacgggaacgcgaccaaggcgccgcccgagacggaggtgcacacgacgaccatcaagacggaggacggcgacgagatcaccatcaagcggtcagccacgtccaagggcaacaagatcacgaccatctcgcgtgacgataagggaaagctcacgatcgaggacgcaacggccgaggagcgacgcacagaggcagagaccgaggccgacgagtcccccaaggcagagaaggaggatacattcgaggatatccccactgggtcccccagtgccatcctcgagcaggatacaggtacagccagacgcgacacggaggaggacgtagcggcgggagcagcacaataggaagacgcacaagaggaggcggtggtcgtgagcggcggcaagaaggtgaccgtggtgcaggtgaaccggtcgctgaccaaagtgagtctatcagacgtagaggaagaggttgaggaggagaatgccaccaggtagcgcatgggaggctcctcatcgtcgcccagcgccgatatttatgtggggaacagagtccttcttgctcggattttctgaataatgcacacgataattatgtagtattccattgcttctggtaggtgctgtctgcagcctgcctacttccggagcgcagaggcttggggatgcagcatgcaggcgagtatggctctgctgtagacatgttatctggtaacgcctgtggtgtgcaggctcatatgaaggtttggaggttgtgagcgcttttaccaccaagactttgacattcgacttgagcgaattgaacgcggccatggaaactcattggaacgtgcacggccatcacgcagcgagatcctggtcacgtctggatactcaattgctcggcacgacgaaattcaaatgggataacgcgaagaactgtgtggtgagcttcgactacacagcggatatgctaacaccgcttctgcgtctactgggaagtctggaagatgcccacaccaacggaagcttgatgcatagctaggagtaacactcaaatattttgatttcgtaaccaggcagattcgctagtacccgtttgcgcttatttcagaatactacgttgaacgacgacatgactaacacaaagttagtgtttgtcgtcttccttaaggcagtgccatagcttctgcatccgtgatccacttagcgactcctacagcatgccacgtgtgagttgtaagtatacacaacgtacgcgagtcagttgtgaatagcaacggacctggtggagctggaccgtgttacgcatttccagcaccttgaagagctccgactggtccaaagttccgttggctgcccagcatatcagtcaaatcgaccaaacattattagccatcaaaactattttcccgtacgtgtttgctacttctacagtgcttaccatcgtcatcaaagatgcggaacgcgagctggactacaggggacgatagctccacaccgctcacgacatgtgccgcacgaatgaagtcggctgcaatgaagtacaggccacacaaactgtaaaattcaacccaactcagcagtttctcttacagacgtcttaccttcggtgacttcgtcggctccagtaagctcaaacgccaatttgatatccggcaagtggctctgcacgttgaagtgaaaggcgaagaattcttcccaggttatcactccctgcaatggcatcacatacaatgtgttagatcctaaaaaggttccgataggcagatcaaataactattacctcgctcgcattcagttcctgcacgcgttccagatacggggacaacttgtccgggtcgaagcaggagacgagcgtgagagcaaagtcatggaccgacatggtctgctccttcgtcagcgggttcacggtagcatataaatcaaactcggccctcaagatttgcttgcggagttcatccaaggcctccccaaggtctttcgccgtgatagtcttgctgaagtggccaaagaggaatttggtgaggcgcggcagtgtgctgtccgcggagattggcacttcttccccaccctcacgagtcgtgatagttcgcagcaagttttcaatcaccgcgctgaactcagccttgtccacagacccgtctccatccaggtcaagcatgcagaacgccacgtcaaagtgctccttcgggactacagtgcaccaccccgctattagtacaatctaccaacaacccccacgtgtgtgctcagtagcagcaatagcttactctgcagcaggtggataagcaggtagcactcctcgtacgtgatgagtccgttcgcgtcccccacgaagtcgcaactgtacgtgacgtccggccgctgtgaaataacacacccagtgagttagctacatctgcacacaactacatatcatctcatagcaacaccaagttgccgtcttacgggcgagtgcagatggaactgcgggagcacgaacgagtgcaagaagtcggtgaacgtcatggccttgacgcgcctgccgtcgcccgcttccacgctcttgctcgcgtacatgtcgaacctcttccggagcgagttgatggccactcgacgctgcttgtactgatccaggtgcgtcttcatctggtcctcctcctgcagcttggcctggtgcttactgcgctgcttgagcagcagtcggcggccgcctctgagtttcgcgctcgtctcctcgccttctgcgccggccaccacggccccgagtcccccgaccagctgcttggcctcagcgtgggccgatgcgtcttcgtcgtccgcagcggccgccacagcgagcgccatcgccgccatccccagcgtcgcaccaacgtgtccgtcctgccgcttccccagccgccccaacgcttcggctcccaccgcacgagcggccatcgactcggcagccgcagagaggcctctacggcttgaacagcgcgctgcagcggcccgcaacacacgcaccatcctcacgtcgccttcaactggttcgaccgttccttcagatcgcaaatcgccaatactcgtacttaacagagactcaactttgcttcatgcattccacacccacgcacacccgtacaagttgggctgccaggctcaagacctggggcttcttatgacgtgggttttccacaatgcgagagagatcggctgacgcgacaacgacaagatgataaacgagtgcatgggcgctgcaatcgggcagggagacggcagcatcgctacatgtagcattggcgtcttcgtaaaagctcgtgtctagactctgaaagaggggagagagctagactagctaccggaagggaggaacagcttgatgttgtggtagcagttggtgttcgctatgccaaggccgatagccgggcgggctgctgcgtaggtttcagctgctcagctcaacgttactatcttgtaagggcagactgattattggttccgccgcccggctgctgaatgtctccggacgctactggcggctattattgtccagcgtcatgccccgggagctccattccccaactcgttgactgcgtgactgaccaaatgcaacagacctctcgtcggtcgctgtcgctgtcgtccgcgtcgatgccgacgcccgtgcgctcggcccgccgcgcctcgtggcgatcgagcgctcgcagcgctgtcagtagtgacagcgccagctcgatgaatgcaggggtcgctccagtcagcaattcgagcacgttcacacttgcgagcagctccagtggcagcttccgcccagaaaaagacgaagaaccggagacgacgcctttgcggaggcccgaaagcacacgcaactccccagtcaagcccacgtcccctgtcaagtctgtggacctggcggcgtactacaccttttccaagaggaacagcaaaattgtgcacgacgacacgcagggactgtcgggatttctcgagtaccggaagctcaacggcacgtggcgaccgttcctgttccagaccatgggtcaccaactggtactctaccgagttcatgtacgtatttccccgtactacttgagttgatatatcctttgggcaacatgtgctaatagctcgcacttctggctaatttgatagtccacacatcaagtgctggtcatgtccacagacattcgctgcgcgtccgagatcgcactcgactatgaaggcaccaaaggttcgtccctcttccctgtcaacgatcgcctggtagactgtgctcacgtgttgatactgcttgtaaagatcaagaggatacgcgactgctacggcttggcatcaatagcacaacgattatattgcgtgcagtgacgcataaggcagcagtatactgggttgaggtgcgttcgaattgctgctcgtgcatatttcagcgcctaacaatcgtattgttgttaacagggactccaacgcctcaaagatggcaaacctttgcaaattattagagatcctccttgctcaggtatgcttgccgtcatctagttcaaaaatggcgaagctgttcttaccttcttaattttcagaatctgaagaagagatttttaatgagattgacaagctgctgtcgctgcgtgaatggacacctccgccacctaccactccgctatgcgggctgtgcgtgtcggtccgaaaaccggagccaccgacgactgggatgttgctgaacactaaggtacaagattcttgtgttcgttttctgcttctgcctcactcacaaggactcacctcgattgccgtttcagaaaatatcactggacgaaggagcgtcttctggctgcaggatctgctgatcgttgccctcgatactcagggaacatcggcctactacaggcatttataatcgatgataacggagactttgcgttcggaaaaggagcccgccatcatcctgcgttcgatatcgggggcgcctcaacaagtcgcttttggtagtcgtagctggacgtggcgtattcagaatgtagcggagtgtcgccgttggaaatctccaaagaggctaacctctgttaacttttgatgatctttgtgaatatccttttgtttcgccttgtccgacgcctccgaagtcgggttttttccaagcagcagggatcgtgtctcgagagtatagggtgcaatgaactcagcacccaacagtgtacccatccctgcgcttcttctagtaccctggtagtcgtggcgcggataacaaccaatgtcactatgtgtccacggcatgcatcagtttatgatcgagaacttctcgacgagaagacaaactaggtctaagcatccaccgtcgtccatttcactttaatggatcttgtgaagcttctcaaacaagttaatgtacagcagctacgcctgaagtgaagactgctgatccccactgtagtcgtcgctccccggcaacggtagatggtattgaccaccttccacatcagctttattccctcactgtggaccatgccctctgcctcgtcattctagtcgcctatcggggccgtacttcgtgagtagcgagcagaagacctgggatcttgaagttacatcgacgagtatgtttatgtactgcagtaaaaatattagacaacttacgtaatccatgaccactaataagatacgatcacatctgatcacgttacaatgctgtacttaagtagttaacaaattcacacgactgcgagtaagaaatttattttcacttcattgaaaatgctacgctctctatcagccaagcgtgaaaacattgagttggtcctgatggaccctatgcatgccgtgacatgcatgctgtctcagtcacttagttctgagcgcggagacggcggccactctgctgaaccgcttcattcgtggtctgaacgaccgactgctgagtggtctggtcctcgggggcctccgtctgaacgcccgtcttgccggggctctgctgctgctgctgctcgtcaccaccctggttttgcgaagcgtcgttgctgctagcgggggcaggagtctcgtcctggttctgcgaagcgtcgttgctgttagcgggggcaggagtctcgtagccaccctggttttgcgaagcgtcgttgctgctagcgggggcaggagtcttgtcctggttctgcgaagcgtcgttgctgctagcgggggcaggagtctcgtagccaccctggttttgcgaagcgtcgttgctgctagtgggggcaggagtctcgtcctggttctgcgaagcgtcgttgctgctagcgggggcaggagtctcgtcaccaccctggttttgcgaagcgtcgttgctgctagcgggggcaggagtctcgtcctggttctgcgaagcgtcgttgctgctagcgggggcaggagtctcgtcaccaccctggttttgcgagccagtttgcgagttgtctccggtgcaaggagtcggggccggggtctcgtcaacaccttgctgctgtgatccattgtgcgacgcattgttgctgtcaacgggggcaggtgtctctccttggtcgcctgactgcgaggccgtctgcgagttcgggcacggggtctcagcattttgatcagctccgttaccgtgtccgccgatgcccacgccgacaccagctcctgcgcccacgccaacacctccgacgtcaacacccacaccggcgcctacgcccacaacaacgccgttctgctcgcctgactgcgaagccgtctgcgagttcgggcacggggtctcagcattttgatcagctccgttaccgtgtccgccgatgcccacgccgacaccagctcctgcgcccacgccaacacctccgacgtcaacacccacaccggcgcctacgcccacaacaacgccattctgctcgcctgactgcgaagccgtctgcgagttcgggcacggggtctctgcattttgatcagctccgttaccgtgtccgccgatgcccacgccaacgcctgcgccgacgcccaggcctccgttgccgtgtccgatgcctacaccagctccaagtccagcgccgaccgcgacaccgccgttgtgtccaccgatgccggctcccagtccagcgccgaccgcgacaccgccgttgtgtccaccgataccagctcccagtccagcgccgaccgcgacaccgccgttgtgtccaccgatgccagctcccagtccagcgccgaccgcgacaccgccgttgtgtccaccgatgccagctcccagtccagcgccgaccgcgacaccgccgttgtgtccaccgataccagctcccagtccagcgccgaccgcgacaccgccgttgtgtccaccgataccagctcccagtccagcgccgaccgcgacaccgccgttgtgtccaccgatgccagctcccagtccagcgccgaccgcgacaccgccgttgtgtccaccgatgccagctcccagtccagcgccgaccgcgacaccgccgttgtgtccaccgatgccagctcccagtccagcgccgaccgcgacaccgccgttgtgtccaccgatgccagctcccagtccagcgccgaccgcgacaccgccgttgtgtccaccgatgccagctcccagtccagcgccgaccgcgacaccgccgttgtgtccaccgatgccagctcccagtccagcgccgaccgcgacaccgccgttgtgtccaccgataccagctcccagtccagcgcctgcagcaacgcctccgttgtggccaccgccgattttagctccgacatcagctcctacggctagtccgccattgccgacaccaagtccagcaccagctccgatgccagcgccgacagcatggttgccgttctggtcagccgactgggaggggttgttgtcatccgactgagggcagggggtctccgcgttctggtgaccgccgccaaggccgattccgaggccgaggccagcaccagcgtccacgccgatgcctccaaggccgaggcccaagccgacgccagcgccaagctgcacgccgttgccagtcgtctggggggccgcctccgcgatgctggagacgatcaaagcagccgtagcgcagacggcgagcatcttgttgcaggacagcatggtgaacttgaagaggggggtacttgaggggttgccaacagaacagctcgggctgttgagaggagacttgggccgaagcgggcaagttgtagaatgaggagctggaagcgggggttgggaagctcaatcgccgcgctacgctggcgccagggtcctcgtcctatcccggagccaccccgcaggcactgcaacttgcaatgcaatcggcaccgccccatccaaagctgaggatccgagataccgacggcacatcgcggcgcatgggacgcgccagcttagcctgagggagaaaagaaaatgactaaagacgtgttcagggtactgtactgatatgccaaaacatagtatacatctatttaaccaacagcacggttaatcgttaacccccccttgtagtatatatatatatatttaatatactattgcgcgtctacagataggtgcatgtagatgctgatatgccggcgtgtggaagcttgtgcgtgtcgcctggaacttagtgggagcgttttccgggttgttaaagtaaggatagactttttcgtgcagagcttgccaacatatgatgatttcatgttccatcatgataatattggaggcaggacacaagtgcaacgcaaattctagtagggacgtatgtgccggcgctgaatcattgcacctgaaatatctactggcggtgtaggcttaccctttcagaaccgaaggtggccatcatgcaaacatttacagaaccacgccttcggctcataagtttccctgaccacgtcttttgtcattttcattttttcccctatctaatgttgccaagtatccagccaccatctctttagagatagtagaaggagtctcctaaagtaaaccgcacgaccggaacgctacgctactgtacatggacacgtgccgtttcggtgatcgatttctgacgtgacgacagccctaatccatcaatacggaccacttcacgacagttctagagcatgaaatgttttacccgattttttatgcgcaaaagtgtccctccaaaatactttagctcgttaactgtggttggcgcgtgctgtaggcgggacaagcgcttgtcgctcgtgagcgaatcatcgacacctttcggtgtggatagcctacgctggcgtcaggtcgaaaaggctcgatttcagcgattgcggcgcaccgaggacacgttcaccgctgggtgcaatcgacccaccgaatacattcggtgttacacatggcattttcaagctttttgctcaagtgcgcgttgaagatgtccatgaggtgaggtgcgagggtgcttgaaacgacatcgacaaatttgctatccgagagcttcaatttactgcgccttccggcgggaaaaatgcttgcttgatagacttcactatctgtctttttctgccttatacagtatgcagtgatatctttcgcgtgccccattgtcgcgcccaccgctctgaacttggccgtctcaccctcatggccagctcgccgcgcctttgccgaagctcgccagcacgtggggggtgcaaccttcccctagctcgcagtggggttcccatcgcctttgccgcgcaagcgtgcggtcagaaaaagctttgcgatgcaacgtgaaacgcgtatctatgcgaaatggccattttgcggggtgatctttacgggcagtgaaaagtgcttgcactgtgtaaaccagtcgaggtgcgccaaggttcaagcagttcggttttagctatcgaccggcttgcatcgcacaacttcgtatgctcgtagatcttggcctcctgcgtttctcgtcgcgcgggtggccgcaacaagtcgccactacagcgatctggtggttgcggatcaccaatgcaccttacgaaaatacatgaacatacagttgaaaggcgctcgagcattgcagtgaatcgtcagtggtttcgtcgggttcgattggtttgtcccgaccgacacgtaggtaataatctaccggcatacattctctcatatggtcgggacgtaaatttcgtgccaggttacacgcaggatctccggtagggtgctggagcggacttcccgcagcttcatcacgggtcgcaggcattcgctgacaatgacctacagacagagccgcataggcaatgaggctgacggtgacggtgggtgcatgcgaagaagccccacagtcgtacgattccggcgccatatctgccacaccgccacgttgacggagcgccatgacatgcgccatcaggctttccacttcggtcgtgaagattccagtcgagtccgccgtcaacgagactcgagtccaggcctttccaactcgacggtcacaagaggtcaatgcttccgtccatcgatgctggaaactggcagacgacagctccacttgcctgcggatgctgacctaacaacgggatggaatcgcttggaagagacgacattcgtcagactcatgtagacgacgcgtcccccgaaaactcaggattcgcaaagcgctacatgaatgaccaaaatgaccaaaatgtaaaatagtcgtaccaaaatatagttttgtgaaaatgtgaggcagtcaaacccaatccgatcttccaacctggatcgaccaaatgatgcgcgaagtgttcgaggcctttttgacggacccgatccgtgtgaacgaggacgttttcgccctctggctggaggggcacaatgcaggagacgcgctggcagctcggttgcgcctcccgtcggccgttcccatgccgttcctgggcggagacgccaagctgcgcgagctcctttggcgggacaccgtggaccagtaccgcctgtacgacaagctggagcactacctgtcgcagccgagtctgttccgctcccagcttctgttccagatcccgccggcgcagcagtactacatggtagagcgctactactcgcgggacgtcgacgtggaccgctggctgctgggcaagaagctctccgggcgactggaaaaagacctggacgacgtcgctgagcgttccgggcgcacgctcaagagctgccgccggcagctggagaacctgcgccgggtgtacgctgctgtggaggaccgcaacttccacggactgccgtgcagagccgtcagcgagctgttcctgctgtccgagcagctcgccagcaagtacgcgtgtctgctcttcatcctgcacacgaggttccaggtgcacccgcaacacccagtcacaggatttctaacctggccggacctgcgcttcttcgctgcgctgctcatgacgcactggctgccgcagcggaagacgctgtcgaagctcgcgttccccaaaggagcctccaacaagaacacggtggaagacgtggttgaaaacggtgctcagatcgcgctacggccaccgagcactggagattggccagcgattggctttctgcaggagaagttgcagtcgacgagcgtacgggagacggtggggctggatctgagtcatccattgacgaactgcctgcgcgacctcaaggctcatcttatcaatgacaacgacgttctcaaagtgtatcgtgagaaaatcatgactcgtttgaggtcgtgggctgctgcagagggcacgctcagtgatagcgctcgcagcctgggcgaactcgagaccaagctctacctagtggtgcatggtttcttgaccatcggagctggattatcccaaccgaaggagctgcagcacctgctggagcatttgctgactcgagttgtgcgcgtactgcacgactgtgaaataaacaagcagcagcttaacggcctcttcagcgcgctagtcgacgcgttggctgagctggacgtgtggtacctcaacggtcaggagactcgtgggctattacttgctagctggaaccgcttcatcagcgtctgtcgagcagtagtgcttactgtctacgatcgctgccacccttcggcgatcatggcgtaccagcaagcgatggcgggtgatgcagcggacgagtcatccttatcggcgcatgccgccagtcgcgttgcaatcgcattcgagtcgcgtgactgatagattagttttcgttaacgatcttagcacgcaaggcaatggagcgtaagacgttaaacggtcagtgagttccgaatggcgtggtggagcttatccgtggaatctggatgcctttccttggtggcgaaagagtaatcttcggtcgctgctcctcgatgcgctggtgatatcgttcctggtggcgttgcagagtccgcactcgccgttcctgagcctgagtgtaggtatcctccagcggtctagcttgagcttcataatcctccatctggacgcgcaaccgctgcaaccgctgggtgtttgcagcatcccgacgctgcttctcttcttgaccaagcgtcaaggttgctgtagccacttcagctgaccgagaggaggacccactgccatacagttgtgcttctgtcgtgaaccgagccggatccgaggttccgtcttggttaccgctgcatcaaaggattgttacaagtctgctccacatattcaaagcgagaacacgcaaaagcctgcccacctgatgattccttttgaactggtgaatggtgtccgcccacaccgtgtcggaatttttgtgcgtctacagtgatgaggcagaatcagtcagtctacaggtcgtagcagaattccgtgacaaacgcgtatacctcgtcaagtgggagaaattaaacgtccctgctgcccgtcgtcgctggttactatccttcttgtgcggcttcgactcgcgctgttgctgctcttcgacacgctcgtctacttcgccaccgggagaagttgtacgctggcttcgtcttcggttggacgcatcaccaccgccgaagacatcacaaaattccttgaaactaatctcaccatttccgtctgtgtctacacgcgtggctaggtggagaaactcgcgttctgtcaggtttatccccaattgttgcaactgcgaaacgaaagatacaaaaatttagtgagtggcgcatttcgttcagtacagactaagcattaagcaccgtaccccttggcaaagttctctatacgataagcttccgctatgatcgttgtcgaaagctgcgtacgcatcattgagtcgtgaaaatgtctgaagttttcgctgcagcgtggccctgaagcccgggtcctgattgtgagcaaaacttcgtgagtacaaggcccatttcgacaaggatacccccatggatgcttacatctgtgctgtgagtggcttgctgggactctgctgctaaactgcggaagaagtccaacgggtcccctttgtctagttgccgctcttgctgtttcttccgccgctgtgccgccaaatagctgtaacgctgctcgtgcacagggccgtatacaagacgcataaactcgtcgtagagcagccgaccatcgtggttaaggtcgtacgtatcgaagagcttcatcaactgaggcttcgcgattcgcaggccttggcgacgcaaattactctcgatttccgccagcgtgacactgccacttttatcaatatcccagtttcgaaagacctggtgaaccctgcgcgtctcatacttggcacgcagcaaggcaagtacacagtcggggtcagtcgtcagcactccatcttcatcggccgctgcttgtttcttggaggtagtgccggcacaagattcattaacttcttgcgatccgtaaacgagtccacaaaaatcgtcatagttcagggacctggaggacatacaaagtcaaatcggttgctatccctagagcttgacattgtctctggcgacttaccctgcgggcgacttcaacacgtgctggaggatggcgtctactttctctcctccaagagcttgagcgaagcccagccgtgtcagcatgtgtctgagctcggcaacacataagcggccatccttgtccgaatcccatgttaaaaacgcttggcgaacgctgcgcttttcgccatatcggtctcgtagcaagcgccgcaagtccttcaattcagcgggctctggaggtcgaacaacatgagtagctggggttgtagacgccaccgtgactgccaattgaacgtgagatgctgcatctatccctgacgtagcgacggatggtggaggtgtcgactttcgacgtgaaccagcagtacccctgctcttgtctttacgggaggcaggagcaacatcaacagtttgaggctgaagctttgggaggctgcgcatcaaaaattgtgaagcgatcgttagaattcaaatactgcaatgtcatacccgctaggaactttacctgttgttactgtgcgtctgcgaatccgactttagtgccgctttacctttaacctcgcagagctgggttgagctctcgcccgcacctcgtgcactcttttccagcaaagcgcaattattagcccgctcatagcgaagcgtgtccggtcttcaacactgtacctgaactcggcgcgttggtcgacaccctgccagcgggtctcggaggctgctggactgcggacgtctggccgtagcagctccactcctcttttcgtgcttgaccgctgctggattcgatgcaattggctcgttcaaaacactgtcgacggcactcccgggtgacgagcgcttggacgttgaagtgatgttggcaggaacgctgcggccagacccccatcctactgcgaccgatgcgtccactgccgcccctgcgttgctgttgccgttcacatgtcgtcgctgcctcatcgtgttgagcactgccccagggctaatcagcacttgatatcaatccatctaccttcaatcgttctcctctgctggtaaatttaaaccacacacgaacagcaatccattgcgcgaatcaaatatagagcttttctcctcctgctctcctcttctattacttggcacgcgactaccttgtctcgctgacgccctcgctcttgttctcgccagtcgggatgaagtagtgcagcgccatcgacgccgagccgcacaggaacgccgccgtcaggagcgcgcgaggcttgcgcacctccttgggcagaatgaccatgccggccgtgaagccgcccacgaacgggttcagcaggtcgctcttgccccgcaccttcttcagactgcagctcatgcccccgaagacgcccaggaagcccgcgaagccgagcatgttgcgcacgctgagccgtccgagccaccgcgccgcctcccgcgcgacgctggagccgggacgcgccgccacgcgctgctgccactcggcgtctgagaggctggccaggaagtagccgtccacgccgatcgtccaggcgaggccggcgccaagtcctcggtacacgagcagcgccgtggtcgaaacgcagtcggaggacgacgtcttggagctctgcggcggcgcgttgagcgcctctcgccgatccgcgaggcaagacgcgcccgcgacggtcagcaagggcatcaggccgcccacggagcccacgcgcagcgcccgggccgcgctggttcgagtcgccatggctgggctccgataattgaaaaagcagtgcatccaagcgcgttgtaccattaaaggggtacaattgtgcgcgcagcatttcatattgcaggaagcgacgggcaagttgacgcggcggaggcgcagctgatatcgacgctatggcggaggaaatcgcacgaggagaagcaacagagcgaccgctctctgctgatgtgtcgatggaggcggttgacccggtggaacgcgcagaatccgcggctcgagagcaggacgaaggcgacaacgagcagctaaagagcgcgggtggttcaaacccagctgctgatgacgctgaagacgacgacgagttctctctgcggttctcggccgcgcagctgaaggcgagggtcgcgcaggccaagtacgaggccaagctggcggcggacgcggagttgctggtggtcaagaaggagctggtggagcggcgctacgaggtgacggaccgcgagcgcgagcgggacaaagtggtggaacagtgtggagctctgcagaggcggctggatgcggtgctacaggagcacaagcagacgctgaacggcatgcgcgaggatctgcagctggagaagctgctggcgacgctggacatggagaaggccacgcgccagaagctgcaagaagcgttcgagaagcagcagcaggcgctctcgctggcccaggagcgggtggagaagctggacgtgcaagtggccaactaccagaagactgagacggtgctggcccagtccgtcgcgcacttgcagcaccgcttcgccagcagggaccaacaacgagcggcgtcggtggagaacgttcaacgtgtactggttgaacagcatgagcaggaggtggcggcactgcgtgaagaacttaacattgcacggagtacggagaagatggcacaggagcagctgcaagagctgcagaaggctatgcgcgacaacgagcagcaaacgctggcttcgaaggaatcggtcgtgggtcgagagcgcgagctgcaggctaaggttgcccagttggagacggagaaggcagtactacagagcaaggctgagcaggtgcagaaggcggatgctcagctacgtagccaactccacactcagagcgaggagatcgcgacgctgcggcaagagaaggaggcgctgcagcgagacaacaaagagctcggtgagattgccagcgacctcatgcagatggcggagaagcagcacgcagagaacgtaaggcgcggcgtcagtcctgcacgatcgacaggtgactccgcctttggcacacctggcagtacccacgaagaagacgacattttcctacagaagcgcaagaagcgcctacgcatgtctctcggctaaaatgcgctctttgtttcgttaacaagagcagcagctagacagaaaagcgagaccctccgcttccgtctcgcttgaccctcaagctttggacaaccaaactactgcctccctggggctgcgtcgcgactaaagagcgccgcagacccggctagctcataactgaagtagcgacggcgtctacttccttcctttctgcagtaccgacagagcacaatccgtcacgtgagtatgcgtcggcaacaagttcagtaatcaacagtaacctcgtacctttcgtttcttcttggacttcttggtgggggtggtcttcttcgcaggcttgggctccttgggcttgtcctcgccgtcgttgtcaccattgtcgttgtcgtccccgtcgttatcgttatcgtcatcgttgtcattgtcgtcgtcgttgtcggcctcttctgccttgacggacacggaggtaaacgctgacgccatgacgctgttgtcctcggtatcggtcggcttcttgggcgacatcttgggcgacttcttcgtctcctgcggcttgggaggtgacgtctctgccggtttgggcggcgacgtctgcgccggcttcgggggcgactcgggcttcacgaccggaactgctgcaggctctggcttaggcggcgacggcgacggcgctggcttggctgttgagggggccttgaccacaggcgcggccaggggcgtcggcggcttctcgttcaggcccagcaggtcgacgttctccaccggcttcttcttgggcggctgcggcttggccggcaccttggagctggcgtctcccgcggcgatgacggccgatggcgacttgtagctgccgttggcgctgtctttcttggctagatccacctccaccgacttctctctatgtatcagacagagaagggagcaacaaggcaagcagcctccagtcagtcggagcggactaagtagggcctgtgtaactgtgcacgcacactcgcttgttggcgccgttcctgcccttgggcagcagcgcctcgctgccgtcgaagcggtcgtcctctttggaatagcaacagcccatggccccacaggcggcggtctcgttgtatcggcggctgggcggctaacacgtggggctcgagtcctacagcgctcttggtcctgggcctcgcgcgtcctttccgcttgtgtgtctttggatccgcttggaccagcaagcgacggcccaggatttctttttctcgcccggtatcttttgctctgtccagaaacgtttggtgtaaatcggacctttgcacgtcaaaaacctcggggtttgggactctattcgcggacagagccggaatcaggtgagaagttgaagttatcgcccgctggccaaatggtgctcgaggttcgactcgaccttgctgtgcctgctgcagggcttgccgccgtgtcaaacagtgtcaacgcttgcatttatctggggacttttgctgctcttcgagcctgctcgagtaaggtcgctataagatcgccatgcattgcttcagatcacgtggcgatcgtccagcatgacaacgcatatggaccgcggagaaatgggcggctagaattggctgctgctgctgccgccgccgccgttgaagcaaagtgtcgatcctccacgactgcattgcgtgcttcagtttgtaagaaagctttcctgtgtatactaaacagccaaagctcgatcacagcagaccgctgagtactgctactcaatgagtattactcacaatacaggtaattcatcggcttggacatttctcgttagagctggagcggggtaccgatggaaggcgtcgattttcaccagcagtctgtttttacggatggaacatccgtcccatgcgagctaaacgaacgtctattcaagtcgaagttgtgaagacgcgtaaaacaaaacccaaaagttgcccgtttcggattgaccggtgcagcacactccctcacttcacgatattcaagacaagcaacaagtaccccagttccagaccgccagctttctccgatgcatcttggtcgattcgagagcatcaccttactgttggtggttgggtcttggcacttacttgtccgagaagactacagtggagattgctacagcaattatggaatcaccgctacaacatgctcggagctaagcttgatttgtacccagcgtcagtgcaagagtgttaatgataacattgagtacacttgcaagtacccatacgcttgctcgggctcctattcggcgtctacggggacgggaaccagctccacttcaaccagcaccagcacctctgacggcgcggacgcctgcaacgcgatgaccctcagctcatgcgatgaagccaaaagcaaattcaacggtgttgggtgctcgtgctttacctgcaccgaaaccaacggcgagatcaaggcatcgtgctcggctccgtttacttgtgcgcctcagtttgcctcctccgaagaagaaacatcagacgccccggacatgagcagcaaggactacggcatcgtgtgcgctgtgtacatcgctactgcaatcgccctcgcgggaggcgctgccgctgtgactttcttctgcttccccaaaaagctcaaaggggagccctcaagcaaggagctcgtcgctaaacggatgtcttggatcccgtggctgctttattggggctcactcaagtcgtttgtctaggatgatggatcgccgacagacttcgtcgattacttttgcgacaagaaggagctcgtggggttcctcgactgccgcaagaagacggcggctgtgcgaccgcgttggatgcaattgtgtgcgttgttacaacattaatggtctcgatctcactcgcatgcttgttgggaacagttgtgtacaacaacgagaattgtaccaccacgcgaacggttaatgactgctgcgagtgccaaacgtggtgcgggagtgaagatatagggtgcgatggatgcacttgtaggtcgtgctcgtccggctcgtatcagtgctcactctcgcaaattaccgtcgatggggctactaccacctcgacgtcattcgcttgcgagtctgccagcgttgaaacctcaaacaaggccaactgggtaacgatgatactcacattgatcatacgaaaagctggctcaattgcgattaacactgccgaagacggctcagcgcgacagaagcttcttcacctggtcacaggcagtgtgtccatcgccctgatcatctttggcgtcctgtactcgcaagcatttagccaaggagagcgacgatgaccaagaagccaacggacgtcggctgaaggtaattgggataacgctggcagcaggttgggggtacgaacagcttgttggctctggaacggtcttcgggcaattcgtggtgtactcgatcggctactacatgtggtaccgcccccaactcgagctgatgaagagtgcaggagcagccgctgttcaccctcatgcaggccaaggcttggacgacagcatcatgaagaccgatggcgttaaagctgccatgggcaagccagtgactgtcgaagaagtcactttgcagcccccaacgcaacaacagtagccctacttaccatgctcgctatactagaggcgaagctttggtctgggaggacagtgtagacttcctttgtgtgcctaaatttataaacgtggggtaggcaagaataatgtaacatgaaagttggtggcaagttttcaaaccctggtgtagcacctttaaaaaaatggcgaagctgccgcgcaaaagacatgaaagaacttaaaggcgcgctcggccgggggcaaagcccccggccgagcgcgttgaggtcatgcattccagctatacaaatttacacaagaaggattcatggggcttagtcaatttacagacgcaggaacgttagttgttatttcaatgattttgagcagcttataacgaaaaaatgcagctatcctagttatgataggggtagtcaattttccgaataaatttcataaattcaagaactgctcactacagtgtgtggtacacgctacggatacggtcgacattctgggaacaaccagccacgaaacgtacaaactccttgatgttacggtagccataatcagtggtctatggactgaggcgacatttgccaattaaagttgggggggggccggccgctgaaataaaattggttaggctgttcagccagctttagctatcctcccagtataattcaccaatttcattaaccacagaaaatcgacaaacctgcatgtttacctttcgacaaagcagtgagtgcccgtcccagacagtaaaagaaaatcaactggggtgcatttcaaaaagagaaaagatccccgccagttctctgcaagctgctgttgggatgaccgagcgcacgatggcagcagcctgcgtgctggtgcttcttgcactgttttcgctgcccgcacgagtgtacgttaacgtgagttcgtgcggtcgccaagtgaccgagctcccgcagctcttgcagactgccgatgctgtcattgtgctgcgtccacttgccggagcggaatggagcctcttcccgagcgacaagcggcttccacaagcgctgaagatctctcagcctggagcagattttatcgcagtcaattttaagcagctcaacttgctgtccggagacaaggtcatggttcgcgatcccaacggctcgatgtcaatcactgtcacccctgcaaacgccaccgcgatcgtcgaggaaactacgagcagcaaaggctcacctcattcactgttggtacgaactcaccccttcttgctgagaggcgacaccgtggtggtcgagtacgttcctagcattatgacgcttatgctgccgatggtccgaagcctgcacgacaagcccgtcgtggtgatggactcgtacgcgttcatcaagtacgggcctaggtctggaacgtcaatagctggagttgatacggaaagcacggtcggagctacggacgaagccaaggaagccatttgctatcgcaaaagtcagccacaaatgtatgcgaaggcccgtgcagtagcgcgattgatgatccgcactgagtcacaacagaagacttcagccacctctggccaagtaaccagttgggcgttttgcacgggctggctcataggacgaggaaaccacttgatcaccaaccaacactgcatgaaagacgcggctgtagtcgaaggcagtgaaggaccttcacttttcgggaagaaaacaagcactgagtttctgccgcgtgttgtcaaccagatttggccttacgctacttctccaccgaacaaaactggtcgcgtcgtggaggcagtggtcggcttcatggccgaaaccaagacgtgtcgggaggcgggatacatgggcgaaaaagttggcgttgtggaggccacccgcgtcgcagtggtgacggagaatccggatctggactacgctctactgcgggtgcttccgaacaactcgactgcagacctggggcggcgttatggatacctgcggctccgtgctgcaggccccacggacggggaaaccatttacatcccccaacacccgcgtggtgagcccaaggagattgctgccatcaaagatgggaagcccgcgattatagaggtggcgaccacaagctcgggggactcttctctgtatcttcgtcgtgatagcgacacaagcaacgtccaaccaacggtgtggtacaatgccgacacggagcccggatcgtcaggctcgcccgtgctgagtcgtaaagacaacaccgtcgtggcgctgcaccgcgctggaagctctgagacctcccaatcggcgtcttcggagcttttcaacatgggagtgcgtatcgacttgatcgcacgcgacctgcagcaacgcaacgtgctgccccaatgcgctggtgtgccgtaaatccaagtgagagtctcagctaagcagcaacaccaagcaagtcagctaaatcattttaatgaagtttccttttggcgctaagcctctatcatttttgcagtagtgacgggatgaaggcaaccccgacggctgcatctgctgtactctggatcgatagttgagacggatgcgctagcttttgcctaagaaagtgctgtagaaggccattgcgcactaacgcttgtccagttccgatcattctaggcatggaatcacagcgtcagatgtaggatacgacgatacacaacccgcaaacatggacgtacggttgctgaagcaggtcagcgcgcaggtcctccggcaccatcgagaaaatattgtccactagaccgcggcaaatagcagcgctgatatcacccaacgaccagttggtgatgcggagttggccaatgctgcctcgcacgtcaggagatgcccactcgccatagagcgttggagaaaacttgagatcggtgtcgagcttggtgccgcccagagaaatcaaacgcgcgtacaattcgtcatcggatagatgctcggctgtcgggtcgactgccagttgctggctccacgcctgacattgctttacaaaccacgcaaatatgtttccactacggtaggtttaaacagttttgtcgttagtggtgcggtgaaggagacctacagccacggaagtgtgcgtacccagataaagaccctgcgactccgaggaaccagttctccgacagaaatggtctgacttcgaagctgagcgagcaactaccactcagttgcgctgcgtcctccgctgtcaggaccatagcgagttgtgatgctgaaccaatgcttaagactttaaacacgcacaggttgttagagtcaggaatcccggttcatttcttggcctgtacgtaccggaagtgcgcgaaaggttgagatcggctgggctccgagtttgtgccattgtggtcatgaccgcacatgggtgatcgcccatagcgaggtataccggctttccgtgcggaagacctattactgccgcaacgtcagaactctggccgatgaccgcacctggagccttcaccgtcggtagcatgtgagctggaagaccgagcgcctggacactggcgcatatatacaagacacatggttcagatcatactcgaaaacacgcttaagagtacttgagcgtacgtgcgggggttccaggtcttggtgttcatgtcgaagcctccccaactgaaggcatcggtgacgtccatgcagttctgacttggagcagagtgtccgcagagtgcgaacgcgatgaagtcttgaatagtcccgcacgtgtcgaatccctcgatgtcacagggctgcctctccgtcatatacgcgaacgtggcgagcccgtagccggatgcgataggcgaagacgatgcgctgccgccaacagcttccattgaaaacgaagtcgcatcgaccgctgcgttggcaagttgaatctttgctctccactcggccaacagcgacggcgagcaccgctggtccaagaatgtgatgtacgtgctccacagccagctcgtcgctgatgtagcaccagtgccccctcttgccgatagaagctcacacattgcctgacgcaccgtcttgcagcgccaccacacgatcccgtgcatctgccccacagcgtcaatgaccattataaactacacgtcagtaggaacaccctcagcaactctgacaactgcaagctcactcaccacgccgcatataccgatcgagcggatgctctgtctcaacggtgttggcagagcttgtacggcagctagcaccgccagcagaatgctcgccacgctctgctcgctctccagcaaactcgcatcgtgctgaatgggcacactggacgtggccaagatgttgccagaggtgacgcacaccagcgcgcacttgacgttcttgagcccgatgtcgatgccgaacatgcagtctctcttggccgtctccggtccgctgctgacgcccgccgcctcctggctcacctgcaccgtgacgggctccgcccccgccttccgtctcttggcactgccgccagcgctaccactagagctggacgtcggcgcactcagcagcttgttgcggcccttgaagctgtagatgtagccgttcgacgcgtggaagtccgtgagcccctgctcctgcgcgatgactcgggcctgttccttcatgagtcggtccgtgacgctctggccgctctcgcgccgcgcgtgcacccactgcagcagcgccgcgtccaccgccacgttgggtctgcggccgctgccgagtttccgctggcggcccgagcgatgcgcgtccagcgccaccgccgcctccagctccgccttgctggccagccacttgcgcaccatggacggcgtcacgccgtgccgctgcgccagcgagcgcaccgagggcggggccgggccctcggtcagcttgcgcacgaccgacagcttgaaggccgccgggtagctcttccgcgtcgccatcgagaggacactcggaggacgtcgaagtggacgatgtgtcctgccctcgataattagacttctgctgtaatgataggctgaaattgaactaatagcttcaactttctgccaattaggtaagcgaaaattgccccatcgcgcctgctgcctgcaggccctgcagtgcagggcaactcccacttgaagcgaccatggaggcggcgtccgcggacgccactagcgcgggcatctctgcgtccccggcgccgagcgcgggtgcacaagcaagcggaagcgctgctctttctgtcggcgcaaatacgacgctgatcgacgcgccagacgccgcaggatccgcgtccgaagccagcgctgactcggcgggacgccgcccccagcagcgcgccaactactcggtccgcaagaagcgcgagctcatcgcgctggcgcaggtcgcgggcgtgcgtgaggtctgcaggatggagggcgtgccacgccgcacgctgcgccactggctggacgacgccgacaagatcaacagcttcgacgggcccgactcgcgcaagtccatcggccgctcgggccgccgcgagatccttcccttcgcgcgggagctgaccgcgttcctggaggagggacgacaggagggaagggaaatgacgtcatcgcacatgatcgactacatccgacagaaccacgcgcagtggctcgagggctacctggcagacaagaagagcgccgagagcggacaagcggcactggtcagactgtgccaaaggttcgtggagcgacgcggcttcgtgcagaccaaccagggtgtagtacgctcagctacgacttcgcctatgactacgactgcgaccatgacgaactcaggcacggctgcagcgaactccagtgatccagttgcgtactccggcatgccggcgatgcacgccaacacacccatgacgcacactcctagcgcgcctgtggtccaacccgctgcggtggaaacgcaatccaatgcgtatgaatttgaaccggaagtccaggaagacactcccgtgctgtttgggctggacattggcactaccgcagtcaaggctgtcctcgtgaaagccgatggtgggcagaccgttgctatggccaacgtgtccttcaacgacgtggtggttccgaggagacctggcgaggactttgtggagaataaaatcggcgtgcagaatgtggaccaggtgctgttggcagtgcagcgcgcggtgaattcgctgccggaggtggcgaggcggcgcgttacgtcagttggtatctgcggtcaaatgcacggaattctgtggtggtgcagtcgagctgtgcacgaggcagccgagcgtttgctggcaacggctggaaactggatccgcgaagatgacgacgagtcgtacgagccggtatggagcgagctcattacgtggcaggatcagcgctgcacacctgcgttcctggacaactgccgacgaaagattgcacgcgccaaatctacgtctaatggttcgcggcccaaccgaattgctgccggatacggcctagcttcgtttgcccatacgctggaaaactctcctcgcactctggtgggcatggacgcttgcggaacgattcatgacttcgtggcttttgtgctctgtggccacacgcttcctagtgaaacctttatggacactacagacgcccacagttggggtggcctgaatttgcaaacgcagacatgggacccaagggtgttgcgcgcacttcggatcccatcttccatgcttcctgcagtgaagaaacccggcacgtgcgtcggccacagctctgccggatatgccgctttcggcttacccgagaacaagcccgtgttcgtgccgatgggtgatcacccgtgttccgtgctggccgctttagcgcagcgtcaagcgaacccaagcagcgactccaacttaacgcgtgcgttgcaaagagtattggtgatgatttagaagtgctcgggtgtactgacgtcgtgatatttgcgtgctcttattacttgcagtggtaaatatcggcacgtctgcgcagatggccatggtgctgacgggaggagacgttgcaaaactatcaacgagctcggaggacgtcgacggccaggacaactcgagctttgaagtgcgcccattcctgttcgaagaccgcttcttgggtgttgcagcgtctctctccgggttcgttttcgcataaactgctgcagtttgactactctggatcgctaaccgcactcgtcttatataacagcggcaacacgtttgcgtggttcgtgcatcagtggcagcagtgggccgaggaaatgggactcgcccccgcttgtaatgacgccaacgaagagcaggcagcgcagcgcgaatccgaggtctacgcgcggctgatcgcgctgggtttgcagcgtcaagacaccgagttgacgtttgtgccgacactaaacggcgagcgcgcggaccccaacgctaccggcagcattctaaatctgcgaatgagcaactggagcatgggcgacatcagcgcggcgctgtcccgcggcctcgtggacaacctcttcgccatgatccccccggagctgcagccgttggtatccgttcaaccgtacgtctcattccactcgcgttccattcactctagggatgcacacttacaatctcttgctggatcactgcaggttgatcggcacgggcaacgcgctggtgcgcaacgagctgctgcaccgcttcctcttacggcgcctggctcagccctcgcagctgcagctgcagacggccgcagacgctgccgtgggcgcagcgctcaccccgtcgatgctgggcggacggcccgtcgtccttaatgtttagtgcgttaaatgtccggtgaggtctgcaggcggatcgccatttaggacaaacggcaacttgaccggtttcatgttgaagttagagtagccatgtccttcgagcgaccttcgagctacattgtcgacacgacgacgcgaccgtccaatcaacttccgacacgtgcccagaaaattcccgtggtttccagctggctctatgtgcaccaaggggtgtaggtcaaaatgaatcgcgctttgaattgggactaaaacgatatatttgctcacttcaacatgccgatcactgtaaaagagtgcagagatgactgaaagctgcacacggcactgccatagaaccgaacgcactatgacagcctcgaatcgactgcattgaacacgatcgcacctcagcttagcgagctgccgcagggtgcgaacaggtctcttcgtctatcttgccagtcgcggcgaaggcttgagggggtacgctggacaatcgttgcccaccgtgcttcagctttgctgcaccctcaagacaatgatcattcgcaagtgtggtagcgctgtcactaatatcagcggagcaatggcagccttgcacatgtacaacatttttctcgctggataccattctactagtcgacgaaacacgactagtagtcgtgtttcatgggttcgtggtccaccggaggataaagatccgagcgctgctttaccgctgcaagcttgaatagccgcctggatgctacagtaagcttagttgtcggtcacctagattgagctactttggaaacgtgatcggcattttcctttagacgaaaactacgcgtggacatcagtaccagaccaggcccaccatggatccttgaagacgcatgccacaagagagctcttgtcatggaggtcaaaaggaggcaagccgcctaaagctacgggagccccaatgtaagctccccattgccggcgttaaacatcagctgcacaccaggtaatatagtcactaagctcgcagctaactcccgacgtaagcagtaaagcagtgcacctgctcaaatccttacttgctcaatcggcagctcgagctcagtggcagggctctaattttttggtccggtccaattttgcgcgtttgaattgcacgttggagccagaaaatagcctggcgtgcgtttcccgcgcacagaaatctagaacgttctctgccacgcggggcgggtgaaacaaggaatttgtatggaaagaagtatggcgacccatcgcagacttgcgcgacctccgtcccgagagccgttaaattcggagtatacaaacaccaagacatcgtcctgggaaggagctctggccactcgttttgcaattcatttgcaattcttttgcaattctttccggtaagacgcgaagaaaagccgcgtagcgagaggggggggagaactcaagaatcgcgcgcttggagacagcgtgcacgccgacgagcaggagagcgacttgagggaccagcagcctcgctagcagcacccgcagcagcaccaggggcacaggagggaaggcaggacaggccagagcactcgactgcccgacggaaccactcgcagcgccctcgtcgccaccggacgagcgcttgtttaggcctattccagcggcccgtttcccgttctctaggcgcgcttattcctgagcgtcgaccgtcctcggtggagatcaattacagcaggtaaagcctcggactcttgtggccgcgttggtgcgagggatggcgtctctgatgctctgtgtgtgacgtgtgtttccctcagtttcactgcctaaaaacacacacgccagcccacacccacccactgcatatacacccacccacccacctcagtcccaacacacagccatggctatgacaggcgattggatcttcacggaacaggagctgcggtccactccgtcccagcgggacggcatgaagtacgcggatgagctggtgctccgccgcaaggcgtgcgacttcattgagaagatggccaaggcccttgacctgcccaagctcgctcagatcagcgccgacaactacctccaccgcttctacatgcgtcagtcgatcgttcggtacgataagttcctggtcgcagctgcgtgcgtgctactcggctccaaggccgaggagagtccgaagaagatcggctatgtcgccagggagtacattgccgtccgcaaagtcgtggagaaggatcaggtgtttgccattcagaagcacgacccgcaggttatcgcgggcaagattatctcgatggagggcgtggtactgcacaacctggcgtacgagctgacgctctcgcacccgtacaagtacatcaatgagaaggtggacaaggtggtgcgtctgcagcatctgacggagcaggaggccaagacccagagcagcaagatcaagcaagtggcgtggtcgttcttgaacgacagcgcgtacacggtggcgtgtttgcgactagagtcggtggacctagcggccggtgcagtgtacctggcgggactctacgagagctacgtgccagaggacctgtgcacagccagcggattgccgtggtggagtgcgttggcgacgcccctccataccttgcaaggtattggcatgcttgtgaactctgttctcttgtcgtgggtgctggcaatgtttaaagaaagctgtgttctgctcccatttgtctagatgcggctcgctacttgctcaaagcttacacggcgccgtacatcaaaacgaacgtgctcgcggcgggactgtcgaagttagtctatatgttccacccgcccaagtcggtcgagagtcccgcgtcgttcgtagagctggacgtcgtggagcaagagcactcgtcgcccatgacggtgtcgtcgccaatggactccgccgcgtgcgtgacgtctccggagtgctgcagcagtcaaggccggtcaccgtacgaccacgacttcgaccacgatgtcaagtcgcatgccaaggacagtgatgaaagcccacgcgagacggcgcaggttcctgccacgcccgcgtcgctgctagacagcttccctattgccaacgatagttcaagtgctgacaagttgttggggagcactgcagcggcgcgagcggcgagcaacggaagactgtcgcgcaaacgcggtaaggacgccgaaaacacgttttgttctggaaagaagtttaagtactgcttgtaaaaggctgcgacgcgagagagtgagcgagagcgctcccctcgacgggcgcgcctcaagcagccaagcaccagcgagcgaggagcctgacacggcgagttcaccgggcgacatgggcttgcagcggcgcgcgcgctcccgtcgccttccagcagcactccactctccgcaggcagcaccacgctcatgatgccgccatcagtttagaaaaagtagaaaagctaaaaactccaacaataaaaacatatttataccagcaacccacgcacacaaacctcgatgctctccaccatcaccaactccgtcgcccgagtccgccgcccagtgaagaatttgattgcttgggaagatcaagcagcattatcagccattcgacaactggcaattccaccggatctgctcgaacacgactgaacctccagcgagaagcggagcaagggaacgcccgcacgcgtcgaggctagggaggccgcagctcttcccattgccacatcaacgcagcttatgctcactcgctcgctttctgcgctttcactggttcatcgcgccgatccaccgcccgcccgactggctcgaccgcctttagcatccgaagcggaagccacttgtcagctcgatggcgtggggcaccacggtcttcatgccagatgcagaggaagagacttcatgcacggcagcggacacggacgaagacgacggaggtgatcgaggatcaagttgatgcctgcagacagacacatacacggccaagcaggtaagatatccaggcgatcgacaagtgttcgagtcgactgctatgcaatgccgcacgtgacgacttcataccttagtggtcgctgcttgtcacttctgggagcagcggcatcggaatccgcccctcaactccccgaaacactcacttgcccccctcgaggcaaactggaaactgcgcccgacgtctgcacatatttttggccgccaggacgaagaagcgaagtgctctcgccggataatcggagcttatccggcgggtccaccgttaaatgcgatcgcatcagcgatcattggccaaaatgcggcttggaggaacagcgacgtgcgacaagcgcgcagttttgcgctgctgcaagaacccagggccggaactggcctcatttacaccaaagtcctagcacgatgagtctttatatactttaacaaagtgtatccaacccctgggcaagactttcgaggtgcttggcgtctcctcccaagtgaagcggcacactgtaccgcttgccgtagtgcgaggaatccgctgctgcggtgcccccaatcgatcgggcggcggcgtgtgatctgcctcgatcgaggtcgtggcgtcgagctccggaccatcccgctgcctgtccgttgccgtcgtcggactgctgagggcggacggactccatggcactcccacgaagcctttgaacgccgcgcgcctgattccggtcacctgtccacaccaagttgaaggagtgtcgaggcgtcctgccgcgcgtcgaggattgtgaacgattgcatttcgccggcggcagagctcaaggccgcttcgcacggcagcgcggtggcagcgggctgagaacgccgttacgaccggcaaacttttgcttcgtgcgatactcgtccggaagagggggtgccgctgggtgctcttgttcgcctttatagtcgtcacccacagcggttgcaagcctacacaacgagtagcatatcatgtggccgttagttcccgtgaacttcaaaccacctgcaccctcttgcacttgctacactgagacttgagtgtactcttcaccaaagcgttcgttacatgtactgcttcccacttgctatcggcagtcaatctactatgccttgatcttttcccacggcttcgcggcgaccgcttcgccagcttgcatctgctggctcagcagcgcgctcgagtcgaccgacagcttgtcctcgatgtcacgaatgcccggcacggtctcgcccttctggatgagatccatcacttccttgaacgattccgggtacgacggcccgcctgccgtcaccgtcggagagatcgacttcgtcaccggcacgggcatcttctcctcctcgtcttcggctgccacgtctgctgagagcgccttcgccacgctgctatcactgttggagatattgctgacacttgtctgctgctccaggcgagccatgaacgcgtcgagacttgtggacgcagacccggacggggcgctgttgttggtgaaccgactgctgccgcttgacgccgccgaccgcttctcctccttagtcgtagtggttgtggtagtcacagtagtggtcgttgacgaagcgccctcttgcttgttcttgtcctgctgcgcgaagaactcttcgaggctagcatgcgcaatttcttcaagtgacagagtagaggacgacttcgggttcgtgagagactgaagcgccttcaggagcgcgcgcaggatggcgatgttttcatcgaatgcaccggtcatcttgctcgctgtgtgccacttccactccatgttaagaccagtcgtctcaaaaccaattgacttgagcagctcctcgtggtgctgcaaacatacaactggttagtaaacccatttcgactttcagagcgcgacggccagggggaatatcaccttgagtggctcgatcttttgcttgaagttcgcgttgccaggggaaatgcggcgatagcgagggacatccggattctgcaagatcatttcaaagtcaaatgtgagacgctactggtgacaaggtatgcacattgccatgctattgccttacctcgacaaggttcttgatatacatactgagaattcccgctgacagtttgagttgttccagcgagttctacatcgaaaacccagcaaacactttagttataacacacacacatagttaagcgattgctatgcgtacctcagttcggagctttttcaaagctttctccatgcgctcagcctttgataccaccttcggaacggccacaggtggctgctgcgggttaaccgttgtcgaagacggcaccgtggtcttgcttccaggagcattttgcttcttcactttatcgccactctcctttccagaagtattcgcatcagcatcactagcactttccgacttttttgacagcaagagcgccttcagagtggagatttcagccttcaactccgcgatagactgcgcgttgccctgttctgcgagcgagctggagatctgcgcagctagcaacgtcttgctctgcatatcacgctccttttcattcaacgaggtgctcaacttggccagctcctctgtctgcttctgaatcgcggatgacacactcgtaagctccgccaacaacgcttcgtccttcttggcctccttctccttctcctcctgaacctttgcggcctccagcaggggcggcatcggacgctactcatccacgcaattccacaaaccgttagcacgccttctaacaacttgaatccctcacagactcgcatcaaaccaccctaccagccatggaatgtatcccgattgcaccgcgtagttccacaggaacgtgagaatggaggctgcccccaccagcgacgacagcgtccacaacactcggacatagggcggataccgcgcctgaggttgcatcatctgcatgggcacagctgcagacatcatcatcggggctgcagtcgcgagctgctgctgcaacggttgtgccacaggttggaccactgccggtgtcgctgccgaggtggacactccgccgttctcgtggcgctcaatcgcctcctggatctcctccttagtcatgcctttgccctccaggaacgatacgcgctcggacagcggcgtcgactgcaggaggtgaagaagtagaaccgagtgagcattcgcgcagcgaccacagcgaattaggacgcgccagagggcgcgatccaagcacaaaacgaagaagattgcggcaacgcacctggacggtcgggtgctgcaggaacttgagcccgttctccaccatttcctcgcgcatggccatcgctgcgctctcctccgagccaacttgaatctgcccaagtgaccgccaacgttgacgcaatgccggccgtgtagcttgtgtacaccacaccatcttcagagatctgattcgccaggttatcagactaatcgttttgtgtttcgtacacaagttgacttggctggctgacagtctccatttcaattgctgaagcccggttgacttgaactgctgcctcgctccgtggacgtttgcaagcaagatggcgcctcccagcaagcgagcgaagaaggatgaaggtgcgaccaatgcggacggcgctgagcccgcgttccagatgcgcaacccgtcgcacatcaagaacaagatgaagcgccagctcgtgatgcagaagtaccgcaaggagaagaaggaggccaagaaggcggcgcagctcaagcgtcgacgcgaggcggaggagatgggcgaggaggcgccgcccaagatggagccgcgcaccatcgacaacacgcgtgagaaggaggtcacgatggtcagtagcgaaggcgacgaggagatcgaggccgacgagcgcgacgacgagttcgccagcatctttgcgaacgaggagacgcccaagctcatgatcaccacgcgcccgttcccgtcgggcgagctgtaccacttcatcaaggacctcatggacttgctgcccaactcgttctactacaagcgcggcacgttcgacatcaaggagattgtgcagttcgccaccaacaagaagttcacgcacctcgttgtgctctcggagaagagcaagatctgcaatgggtacgttgtcgaatgctcacgctcattgtgcgctgtgcatggtttgacttaccgctgcaattgttgatgtgtccgtcttgcagcatgcttgtgagccgtctgcccgagggtccgacggcgttcttcaaggtgtccaacgtcaagcttacatccagcatcaaggagcgcggtcggcgcacgaaccaccagcccgagctgattctcaacaacttctcgacgcgcctgggtcaccgcgtgggccgcttcctgggctcgctgttcgagcaccagcccgagtttgagggccaccaggtcgtgacgttccacaaccagcgtgactttatcttcgtacgacaccaccgctacacgttcgagaacgagaagaaggcgcgtctgcaggagatcggcccgcgcttcacgatgaagctgcgatggctgcagcagggcacgttcgacaccaagtttggcgagtacgagtggatccacaagcagcaccagctcgacacgtcccgccggaaattccacctttaagcagcatgcgctatccatttactcaatcgacaaacgtaccccaacaccgtttcagttagagccttctttacgttacgtgttggcatgcgcggcccgcaccgagattaaagtgctgcttcgctatgaagcgatctggtggtgcaggccaccgcccgaggccggttttaaacacacagaccacctggcgatttgcaacgtacgcgcgatccaatccttcccgaccgtccgtttggagccgaagggagctcgtgctcgacaccttcgccttgaaggcttccgcttcgtgtctgcaacttgtccagcagcaagtcagtgtggttgctgtgcttctagcaatagtgacgtggcaaacttggctgggacggtgacggcagcgtgtcctacctggccgcacgtctacaccgcatatcgcatcttccttcttcggcttcgggaacatggcgcaagtggcgcgatgaatgtaagacgcaagaagaccaggagtaaagtgcaaagaaagatgtttctcttcaaccgtttaaaatataatctaggggaaccatgtgcctcggttgctccgtcttcagtctcgctcgcgcacccgtgctatgcttgtaggcacgataaggcgtgttctcgcttgggtgctcacggcaatcctcgcggcgctgctagtcttcgacgtctgctgccctccggcgtcgcggcccacgcatcgactcgatgcgcttactcgttggtggcctccatcaggtaagcgatcaggtcgcggcgctcctgcggcttcttcaggccggcgaacaccatcttggtgcccttgatgtacttcttgggggccaggaggtactcgaacagggtctcgtccgtccagacgacgcccgagttcttgttggcagccgagtacgagtagccgtcggcctggccggactggcggttgatcatgcccgagaggttggggccctgcttgtgggcgccgcccgcgttggtggtgtggcactgcgcgcacttggtcttgaagatcttggcgcccttggcagcgtctccctttccgccggcaacgtcaaccattgttcttgagtagaggaggggggttctggtggtggtgcttgtgacacggatgcggtctttttcaaagtgcgtcggcgaaagcctgcggtcacggcgcgccgctcattaaacctcgggatcgaggtttaaacacaacgtgcggacgcgaaacgaccgaaaccgctgaagcacaacagccaatcagcgcccgcgaaacagtttaaaacacttcagctttcagcggaagtcggatctgcgacagcgcgcagtcaggccgccttgaagctcctcgccctgcatcttcagcgccggacgcacgccaacctgccatttcgaggtggaggcgctcgtagcgctaaagtggtcagcccatttcactttcagcgactttttgctggtagcgccgctgctgaggtgagcttgaggtgagccgcagggcccttgaccggttactgggttagtcgcacggctctgcacttcagaacgtcgcgcttcaggtgtttaaatccgttttggtggtgtgggcccctcgggcccaaagacgtgcagccccaccaagtgctccatgctgtggcgcgcaatgcccgcccgccgcccgcgtggcgtggcattcgctgacgccaagttaaaccgcatacaggcaccgcgcgctggatgaacgagcgggatcaagatcattgctgtatattctgctgcagcagtcagctgctgcatctggtaaccgcgagcggaaggcctggatgcaagctatcttcggggtggaggtgcacttgctgctgctgctgcgattcgtcgcgttctccgctcttgttgctcaggcccgaacactacggaattcgatacagagtgctgctgacaatctcacacgggggaaggaggcgtcaatagcgaaaatgggatggcgagcggcttttgtccggctgcccgaagcactggtgcaacctcgacctgcaagcgttttgcaggaggctgagttgcgttttgagctagaagtggcgtaaaatcaaactggacgtgcctccgcgcgtgcttgctcggcgacagcgcacgggtagttctgtcgcgcagggcgggatgaaagtggtgccattgcggattcgctgctgcagcgcgccatgctttcacggccccacgcagttctgcttgttacgtcaggaatttgttcgcttctccacgtggcaatggagcgaggagctgtgctacactgcaagtgtaggtatgcacggatagaaagccttgctttgagtaatgagggctatcattcctaaagcaacgactgctgcttgcagacctctggtacagtataaacctgtacgcacaccaccaatatacatgtacccggttttcatctccggttcacgccagcgttggggaatcatttgcacgctccgcagcatcatagagcgcgaatcgtgaagagctcctcgttcgcaccatgaaaattccaaggccaagccgcgcctcaccttcgccaagagcttgtccacgaaccgcaccaagtagcagggcgtggaggtgcctaaggattccccatttagcttcggtggcagctactaagacagtctgggagctcgcaggcgcaagaaaggctcctcccaggacgccgctaacgacagcgacgctcaggacgaggacgtgccgcccccgcgctgctagaccccgtgggctttgcggccaaatcgcacagcgtgggcgatgacaaggcggccgctgctgcacggcgcagtgctgctgcagcgagggcgtcgtactacctacccgaacgtgcatggaggtaggacaaacagtactgagtcaccgtgttcgggttccagtcgagcgccaagtccttcatcctgcaccagttccagtcggtcaacgaggtcgtcaactactcgagcagcagcggcgacaactggctgcacttgccctacgacacgagactacaggtcgagaaggcgctaagctacgacggacgcacgcttgcgaacgacatcatgatccgcgtcaagaagtgctacccgtccgaccgggacgcgaacgcgctcaatgagacacctgtatctagctactttggcgcaccagagcttgggctcgcgtgatgttgaggtggaccccacggacgcggagattatgcttcccccgcgccgccgacaggatatatactcgcggcttctgagctatctatttaactggtgacacggttgccattttgcagcgggatgtggtgtagcacagatgcaattgtggagtagacgtgagtggactgataggcacacaggatcgcgagacaagcacaccattggtccggggaaagctcgcagtccccgggtaggatacaagttggcggataaattggtgaacttcagtgagctctacccaaagaacttctcgcgtttctttagggtccttgccgcacaggaatcgatcactatccctgttgaagggtagtggtgttggaattcgatacaggcgtctcgagtgcttcagccgtggtgatcttacattttgtatccatcgctgttgctcactcaccaagagcggcttcaacttgggcttgggcactcatccagttgtagcttgtgagacagtgctttccaaaactaatcgtcaaaagacacgaattactgtgcaaggtaatccgattatcgcaggctagatcccggtcttcttctgttgagttgcaaggtcggagtggcaaaaactagttctcgtagcctacgagaactagaacctacgcgtcgtaggttcctgaaaagcctagccctagtaaacttcgagataggatgaaaatgttcctatctcaccatcgtcactcgcttggccatcttcttgcagcgaaggatcatcgggcggcaatgccagcacaccaagcagaaaaatgaattgccaattcgccaattatcaccaagcgcgcaagctgacccaagaatacctttgcactttaagcgtaatgcttccgtccatcgtcccccgaatccagcaaaaggtgctcgagcagcagatcgtggccaacagccccaagcttgcccggatcctcgcccaccctgccggcccattcacaagtacgctgcagccgcacctccatgtaggatacaagcgttacaattgactaacgagttccgtgtgttgctgcagttcacttctgggcaccgactttcaagtgggccatctccatcgccaacatcgcggacatgcgcagcgatcccgaaaatatttcggtgctgcagcagcttggtgcgtagagctctgcatcgacacccaaactgactgagtacggcgacgctaactgttaaactcttttgctgttacttcgagcagcggttgccggtggaggactcatctggtcgcgctacagcacggtgatcacgcccgtgaactggaacctcctcgctgtgaacttcttcatggccggcacgggcattgtgcagctgtaccgcaagtttgagcacgaccagtcggtggcacgcgctaccgagaccgcgaagacacagtacggaacggccaaggcagcggtcgagtcggccacgctgtaggagggaggacccaggaacgtatctgcattgctaacttagctgcccgacggcttctttcccatagagacctagagccagaagggcacacttaatggcgacggaattgaacgcgctcaatgcacagcctgtgaattgagcgcgttcaattccgtcgccatgaatcacagcatgcccgctgagcttgtatgttggatggcgctgatagacacgcgagcgaatgcttgcacaatttgcttggtgcggacggcgtcgtgcttcgttgagtgctctgagcaggagcccgtatagacacgtgaaatgaatcgccgacacgagctgttgagtgccatcggccgccagttgcttcgtcgacattttgccagcgaggcatatccactggggatcaactcaagcgccaacagcccaacactcgagaatcatggttttcgttgcaaatcgctacagtcgttcctcagatttcgtccacagatgccggtgaccgaggtgagcttttgactaaagttaaatagaaaactgtgatccagcccgcagactgcgacctgcaggcagtcaactcacagccgacacgagctcacaagcagagccttcaagcaatttatagcttggaagctagacggacctacagcggtcgcacttcagattgaagttcagtttctcccgtactgtacggctgggctgcttcgatttccagctcacaatcgcttccgccgccttgggctcacgttgaccgaaagcagcagtgccctgccccgtacgtcactccgcccgcacaagcactaccctcccccctccccaaggatctcgccatgctgccgtctatcgtcccgcgcatccagcagaaggtcatggagcagcagatcgtggccaacagccccaagctcatggcgctgctcaaccacccggccggccccttcacaggtgcgctacgtcttcggcgtcaggcgccgcattcgtactctaactctgtactcttgtgtgtctgtattggctgtacgtactgtactgtagtacacttctgggcgccgaccttcaagtgggccatctcgatcgcgaacgtggcggacatgaagcgctcgcctgagaccatctccgtggcgcagcagacggccgtgacggctacgggcctcatctggtcgcgctacagcttggtcatcacccccaagaactggaacctcttcgcggtgaatgtgttcatggccggcacgggccttgtgcagttctaccggaagttcacgtacgacccgtcgctcaagacgcagacaacgacggacagcgccacgctgtaggcagccgtcgctacgtattcctcgtctattgctgcctagcgagccagttgctcccatagagactcctcgccgccacggcgccacaactgacctacctaatatgaacgggcagcgtctaagctgaatgcagtgatgtttgttcgttcagctatcctgggctcgtgcttgttgtgctgagatctgcgtcagtgcagctccggccgagaagaatcctggcgaggggcccatcatgcatcgtacgtccttgaaggtgggtagatatgcattgcttggaggtctcgttaaagacacgagttcgcgcaggatcgccgacacccagcatccttgatgagtgccagcggcgccaggaaggccttcactgctgctaccagccagactgcagtgcctgataatcgaggggcaagcaagcatcatcacaattggatccagcgggtcgatgacgagggtcgtgtggtgttcaaccgatatcgctgctaggaaactcaccgcttcaagtttgcttctccatgctcgctcgcatgcccgctgtgtttgtatactggcgccatgctctcccagcgctgactcgtcttaagatcgcggcgcggcttcgcctcctcctttgaatcgtcaccagcgtgcatttagccagcgaccaccagaccgactgaagcttcatggcgccgacatccgccgccgtcgcacgtccagcgaccatatctacagtgctttgcgctgctcaacctgcgtcatgcatcgtcaacaaatccccacccgaggctcgcttgcttgcttggcagcttttcggcggtccgcatgccaacagcccacacaccaacactatataccatcgctattagagtcttcctccaaccaaccaacagactcaactcgaagtgctcatgacccatgagccctgcaggaagtgcagtctgggtgatcagcatgatttgacgattggtgcttggtgtgcggctcacatacaacaacttcagcctgtaaatatcctatagccacatcatctaatcaccatctctcattggctaaatcttctctccgacctccccattcgctgaattagtatcctagcctagctctaaaaagcgaattccagaccgccgggagtcagtcgcgcattatccatcacttccaagcgctccacgtcgaccctaagccgccgccgccatcgccatcgccatcgccatcgccatgctgccctccatcgtgccccgtatccagcagaaggtgctcgagcaccagatcgtggccagcagccccaagctcacggccatgctcgcgcacccggcgggccccttcaccgtgcacttctgggcgcccaccatcaagtgggccatctccctcgccaacctggccgacatgcggcgctcgcccgagaccatctcggtggcccagcagacggccgtgacggccacgggcctcatctggtcgcgctacagcctcatcatcacgcccaagaactggaacctcttcgcggtgaacgtcttcatggccggcacgggcctcgtgcagttctaccgcaagttcacgcacgacccgtccaagaagacggaggccatcgaggccgccgccgccgagtcgagctaagcagatactatctacctacccacctacctacctacactatacagtagcagagcatcacgaacgtcgctgtctgtctggttgactggctcacgctgtacgaacgaactgctgcgggagcacgtctaatgacctaaattgaacgagctggtgacagcatttttgctgcgatttatcctagctttttgtgcagtgcaagtgaagatcagtggtggtttgtttggttccgacaccttctcccaatatggactgggattttttaatcgttctccgacgtcatgccgttgccgtgggcggctattaatcctgaacgtggggagcatggccacgcgcttgattaaaataaaacgccgggatgaagaaggtagttggaggcgaggacgttacggttgcagtcggccttactgcaagacgcgtgcaagaagttttcctcggtccgtccctgccatcatccacgctatccttagccgagaacttgggtcttatcggccttgctggcaagtattgctgcatagtattgagcgtaccgtgtgctctgaaggtgcgtccaacgagcagtgagggagagtgcaaagcaagatgcgggtcattttcgttccagccgtcgaagactcagcagaattgaagtaagtccaactgaagttatagagtccaagggatcctgacacccgcccgcgtcgcaagtttcaagatgatcaagaagctcccgcgtctctggaagatactcgccatggcagttctagcgctgtgggggctggcagacggccccgacctcgtgtcaagcaaaatggtgacgagctcgcagcagtcattccgagaggcgaaagctaagcaggatgcagaccgacgagccgcagagattcagcgacagcaaatactcgcgaacactgcggccaagttcgatgagcggcagcggacctactcgaactacgactcgacttactcgtggaaccgacgttatcgtagctctacaaacgtactcaactccaactgagggcatttatgaggatacctagagagaaacgttgtacttagcctaaaactaatcgagcagttgatgcttccaaactcctcttcgacgtgtacgttacagcattggcgacacctaaaacggtgtggcatcgacatacaagagtcttccatcagcctgcatttatctaccagcgatacaaggatactaatgttgcgatggcgtgagcgtgatcgttaagctatttggcgagaatgggtggcgaggacgattccctgctctaatacaagaatcagccgaggacgtttgagctagtacaaggttcctcaatgcacccctgccgctgggttgcggtagctgctgtgctatccttggtcgtacgctcggccttatctatcctacggtctcgagtgctggacagtactgcgctgcctgtctggcagaatcactttttccaccacagaaccgtagccgttgtgcaagcagactcgagatggttaacaagcctctgcgtctctttaaaatggtggtgaaggcagtcctggtcctctgggcgttagcagacgactctgctgtcgtttcaagtaaaatggtgaccagctcgcagcagtcattacgagaggcaaagaccaagcaagatggcgatcgacgtgccacggagattcaacgacaagatactggcaagtaccgcagctaaattcgacgagcgacagcgcacgtactccggcaatactgtcaattactcaaggaatcagcgatatcggaacactactacaacataaagaacgacaattgatgactacgatgtagatgaaccaagaaatctgctacctaaggggttacaagtaacgaaagttcaaactatattaggctcttgctgtgctgctacatgtagttgcaggtgcttctctaaaagtcgttttatgatgataaatgttctccctagatgagtcgatactgctcaacgagccaaattgggtacttgccagcaatgaacgggcccaacccatagtcgaaactgttcgttatagctgatagctgcacttccgtgttgttgcaaattggcgaaccacccagttcgatccattggccgaccgagtctgtccaggctggcagctctgtcaagttcgtgtgatcgatcgacaggtaactgatgagcatcccctctctgatcgacgaagggagagatttaatcgggttgtaggaaaagcacacctccaagtactcgtccagcaacgagatcgtagtgaaaaggtcctcgggaaccgtctccagtccgtcgtctaacaacgataccgacagcgacgggatctcgaacaatgcggttgggaactccttgagaggagcgtgttccagatacacaagcctcacgttggaccacgcgtctgccagttcatcggggatcagcgtaagattcgtgatggaaatctcaatgtctgcgagcagtgggggcagtggagctgtcagcaaaccttgcggcattgcggtcatgttcgtgtacaccatgatcaagtagatcatgtccggatgcagatcggcattcagcgctgtgtccgcgccccattcgactatcgatacgttccacagctcaagtccaagcatgttggagaagcgacggatggaagcgggcatgcgaaactctgggcagtgttcgaagacaatggcagtcactgcgtcgctctgcaagcgctcgaggatgtcgttcaccgggtaaggcacgttgtggttgtagcagttgtattccagtacagagcagctcacgttaaccgaaaaccacggtcgcagtccttgtaggcacattttcatggtatcagcatccgccgtgctagccaggtaggcagcgtggagatgcagacccagagcgagagcccccgcagccacaaacgccataggagtcaccactcgacggaaaaatgtcatgccagcaaccctccaggaaggtttcccacgtcttaaaatggtgcttaacgatttaatagttgatttcccacgaactgcagcagaagtcgcaaccgagacgcttgctctagctttgctcttcattcgcttcggcgggtacaactcgagcaggaggctgatactcgccatcgctagcagaatactcaaatgtgggataatcttcgtcactccgtcgacgaaattgagcgcgaacaacgcctggttctctcggatgaggttcgggaaggccacgtcgccgtagagcatttccatggggaaaccgtaccagccgtagtcaaacactcgagcgtagggcacaaagatggtgagaggcaagatcagacacgccatcatcgtcaacaacgtatccaccacaacactcaagatccggcctcgaatcgacatgggcacatattcgcggataatatggctatcggatgcctgaatcacttcacgttttttagacgttagcatgatgtagtccagcaacggagtcacccagcagttggctaccgccatagcggtatatacttggtttatccacaccctgccgatcaaggcgctaaaatggctgcattgcacgatctgggcgctggcctctactgctttgcgcaccacgaacaccaactcgaagtggcttccctcgacactcagcacctccttcaaccctgcagcagtgaacgaagtgatcgagctgagtgacgtacgcgagcgagaagaccgcgactcgatcggttgcgtctttgccttctttagcccgctaaaggacttgatcactctgtcgaccatggcggcgcgagggaatacagcgggggatcgagctttgatcgaccaaagcagatgcagaaccaattgaagcccgtgcagaggtcccagaattccaacaagcgtgccgaacagacgaaagtagcgatgctcgggcaacgccaagaggttggtgtagtaggccatgagggggttctccatgaagaagtacagcatcgtcatcgccagcaggtaggacgcgcatacgccatggagtatcagcagtagtgtccacactaccacatactcccaaggggagagtgaatccgttagctcggtcggagctttgggcttggagattcgccgcaccttggaaacgggtagctccatcggagcaacactgaagacgtctcgctccaccgcgaaatcatcgtcctcttcaatgaggcctggtggctgcatgctggatgcgactccgagcaatcgtcaaggtcagttgatactttggtttcgttggtgtcgactgatatagtgacggctgattagacattttggacgagcggtcctcagagctacagggcgccatccgatagaatctgcagcagctggggacgaagttaataatagtggtctggcgttcttgtctcgcatgatgagctacatgtttatctttgtggagctgcggtggactcctatttaataccagcgggagatgtaacgtaagagccgttgaagatgacactggtttactcttactcatggggatgcgatatcctcccatggtatcgacattaacgatgcaagtctcaatagattttgggtgttgctgggctcttcagaacttagacctgtgcgatcttgcacgtaaaagttgaaatgtacggaacgctcgcgtttggtttacgctttatattcttgttaaactggggtagctggacaccctccacgtccgctatctttattcaccctcgaaagttgttgaggagttgctcttgcagggactttgcgttgagctgatagcctgaagataccggcatattcataccttgctgtccgcccattgacatctgctgctggccgcccattggcatttgcattggttgctgcattcccatacccatcatgggctgctgcattcccatcgattgaggctgcatggtcatggacatcgtccgctgctgctgttgctgcattcccactgccatcggttgctgtggctgcattccaaacgtcatcggctgctgcatactcatcgacatcgtcctctgctgctgcatattcatcgcagccccttgctgttgcatgccgaacgtccccgacatggccatggacatcggttgctgccctggcatgcccatagattgaggctgcatccccatcgacatcggctgctgcatctgcataaacggttgcgtcggagactgcggctgctggaaattcaagttggccatagtcgttccgctctgcatctgaggctgcatcatccccatcacgttaggaatcttgttggcattcattgacattggagcaggcactggcatccctgccatttcaacgggctgaggtggtcgcacctgctgttgttgctgcgtttgagctcccatcccagtgttgtctgcagccttcggaggaacagggactggcagttcaatgtcgaagtttatcatgttcaacgcgtcgaagtcacggtggatcttggcgcggtgttcttctcgctcttcccgacgctcgagcttctccttgttgtggttaatggcccactgcagctcctgaagccaattgcctcgctcctgttcactggtggcgaccaattcgtggccgccgacaactccaggcacttcaatccggaagccgcagcctttgggtttgctcgggtacgtcgccgtcaccacgcggacctcgtagttgacagggatgatgataatcggccggggccccgtggcattctcatacagcagcaccgcctcgggccgcagcaacgcgaagtgtttgacccatacgccgtccgtcttcttgcgcatcagcggcccacgcagcacactgttgggcatctcggcggcgtccacagcgctcacgttggcgtactgcatgccattcatgctctcattggggtccacctcgcgctcttccaggccgtagcccttgtcctcctcctcttcgtcgttctgcaccgcgtaggccgcgtccaagtcgacgtcttccagctcggcctgcttggccagccacgcgttcgggtggatcatctggtacccacctccgtagtgctgagggatggccgcatggggcagcagcatgctcagctctcggggctccccgaccacgcggatccgcggctgtgtacgtgcgcccagcagcttggacagcagcagcgtcaggacccgggcgaaggccgagctgttcaccaccagaatccgcttgaccacctcgggataccatttcttgcacacctgcaggatgtccgtgaccatcttggcctcgaggttggccagcgagcagttggccacgtccacgatgaagacgacgccgggggcgcgtcgctcctccatggcctccacggccaggtccatgaggtagacgcagagcctccgggcgtcctccagcgagctggccgcggagccgtcggccgcgcctcggccctgccgctgcagcttctggccgtccccgaacgcgggcttgaagtgctgcagctgcagcagtagaacggggcagccctcggggtcggccactccttcgagaaggtgggcgtaccccttgcggacctcctcctgcagcgtgggcagccccacgttgagctccaggtagtgcatctcactgcggaacgcgtgcttctccttgagctgcagagcggccttcatgacgtccccgttgttgcggcgcagagtgcgggccatctcggcctcggtgaagacgtcgggcagggccacggcgctggccagggcctgcagaggcgacggctgaccgctgaagcgctggccgccggggagttgggccgcgtaggcccccacgtcccccgagaagttggccggcccgcccccgtagccgctcccaccgccgtacgagtagctcatgttctagtgacctttcaagaattggcgaggacgcgcgttattgatagctacacacgagaccttcctcctctcccccctgcacaactgggacattgggatcatcataatgaagcaagatggctacaccgccgaagcagatggctacactgtgggcaagttgaagtcaaggacggcggagctgccccgaggggagttcgtggctgtatggctgttgctgatgacgctgcacgccctgtgtgcggcctacttgctggcgatggcggggctgtacttcttcatggagcagccgctgatgatctacttctcggacctgctggcgcgcccggagcaacgccgttttcgctccttcggggtggttgtgggggcgctcggagcgttccacgcccttcatctcgtactccacattgggtcgtccattgaagcgagagctttggtcgtttggcctcggactgcaatagtaaagaggtgtccaaggtttgcaaggacgtcgaacaagaaggtgacgacaccgacacaccaaactgcagcaggcaggtcagctacgcgtacgtttctcgggctgaagagccaggtggacgtcgaaggacaatactttgagctagcttttgtgctgcaaaaggttgtggaggtcgtcgcgcagatcaaccagtgccgccgatacagtgccctcatctgtcaacgttcgtgggcttggtcgtcgctaattgtctactgacggcactgctgaacgcctcatgctggcgactgcttcgcacattcgcgagcgaacgttgcgtgtggcaatggacgcgttgctgtcgacgatttcgtgtctagtgttgccactggcaatctttctgcattgggcgctgcagtttgactccgagctgttgacgtttccgatggaagtgctttatggcgatacggcgttcacaagactggtgtacgagaaccaagccatctttgccctctcagtttctgacagcattgcgaagctcgtaccgcatttgagcattttgctgagtctgtcagtatcagcttcattctcgagaggttcgctccagacgctgtgcgtagcatgagacgcatcgcggtggtgcccgctgtattagctgcaaagaacgagtgtcattatctcaagcttctcccaagtcccatcccttaaaactatcgacatttttgcagcacgtcgtgccttcagtaggtttcttcaccgctgcagttgtgctcagggatgccgaaaaataaattggtgctgaaattattgcaatagatttgaatcaataatttattgacatgttcttaaccgctatctaccagttatcttttgagttgagcataacatcttcgattatgtattgtgggctactgcagccaaccatcctccaaacccatggcttgagctcgaccataccaactctccccacttttcattccaccggaagccgacaacccgccaccaagcccaccacgagccgtcacaatgctcgcagccccccgtccgcctcgcaccgccgccttcactaacacgcaggtctccaacttctacttccggccgtgccgcgatcaatacgacgaggtcattctcgagtacttccgttgccggtgcggcgcggtccggaagcgagtcaccgggacggggtactcgaacctgatgcagcatatcaggcgcgagcaaccctcgtactcggaggagatgctggccgcaacacccggtcagacgggctctcttgctcactacgtccgccactctgctcagaacttgttcggttggctggagtggctggtgaagtgcaacctaccgctatcattttgcgagaccaagttcgcaagacggtacgacccagctctctactgaatatgtactgtttcacaattaactaatactgtgtttacactttgcatctagttacacgcgcctccagcctatctctgtcgaaacgcttcggcgcgtcatggacgcggtgacgcgctgcgtcgagcacgcgatcgcagctgagatgagatgccggaggagtttggtctcatctttgacgggtggagccacgactcggagcactacatcgcggtcttcgcgtgctacgaggttgatggggttctgaggtgccccttgctctgcatggcaccactcgtcaacgatgagaccgacgacttctccgcggctagtcatcaagccttcttggctacgatgctagcgcgcgactatcagaagcgcctggaccaggttctcttcctggtgggagataattgcggcgtcaaccgccgcctcgctacgctgatgggcgtcccgctagtcgggtgtgcaagccaccgactcaaccgagccgtcgccgcccggctgagcgaatgcgctgaagatgtcgacatggtacaggcgctgatggtaaagctgcggaccctccaccagtctgcaaaaccgcggttggtatttgtatatttcctgttatttttgttatttagtgtgatttaactgaaattgacactttggtgcttgcaggttcaagaccgaccttcgaccaatcatccgccagcaaacccgctggggttcgacctttgcgatgattaaccgctacttcgagcttctaccattcatcgacgcggaggaggacgagttggccgagctccttcccccggcggcgtccaagcggtggcttcgggacttgctcggcgagctgaaggacgtggagtccgtgtcgaaggctctccaaggtgctgacgcaaaccatctcgacgttcgcgtctggttcgatgggctcattgccgcgaagccctcgtacgcccgttatctcggtacgtttttttgtctattatgcgttattggtacatttactaatattaatttgtatgtattgtattgtagcaccgcgggctgacatcgtcgacttcgaggcgggctgcgtcaaggtgctcaaggggcaagccaagcggctgacccggatggagaaggcggcactggagcgcttcttggcggctccaccagcgggcgagggcgagcaagaagagaaggatgaggaggccagcatctccttcgtggagcggctgcaaaagcgtcggcgcctggaagagcatcaaccatgctacgaactgctggcgtccattccgcccacgtccaacgtggtcgagcgattttttttagcatcgctcgggccacgtttgggctgcagcgccacgcactgcagccgtacacgctggagatgctgctgttcctgcggcagaatgctgattattgggacgcgcgcactgttgagagcgcggagtaaatgataggtatgtaacctgatggaaggtatggatcttggacacgaagctcggacgaagcggagggagggacgtcgcagacggcgggaccggagcgaaggcacttgaggggtagaatgaagattcgaaagtgattgaattgttggagcttacaccctactgttatagacacgcgaccctgcgtcctatcacctagtgcatctaatcaaccatcactcaccggtgttcatccaatcatcctactcgtctaatcatcggtggcgtaaacaacttaccgtaatcaccataatcaacgtgggttcggattggaccggttcgggttaaccggttaatgggtacaactggtacacagtacccaagaccagcaaccctcaatataacccatcaatacactgacattgcaccaataatctgttttgctgtgtgaagtatgtcgatattctattgcgggtttgtttagtttgatgttcaattatatattctctcttcttgcttgcaatagataacaatgcaatattcggcaaccctggttgtgcttgccttgcactttgaggcagcgaatctggtatccaacgctgatccttccattactcaaacgtgtctggaaagtgtgcgtccgtggcttgccccgaatttaagctgctccgtcatcaagttcaactgttatactgggataggaagcaacgttagtgctgctatcgcagaccaaataggattatatccgtggtacatcaagtcaaacgatgacccctcttggcatctaactggtatatttcttgaaaccggtacggctctggtgccgcactgggccctccaaaacgtttatatgcgtgggcagactgaaccggtaggatacccatcacaccgatatgaccccggtgtcgcactggggcctccaaaagcgtgggcagattgaaccggtgtgctaccgacgacactggtatgaatcagtgcatatattattgagcaggatccggatggacgaagagagcgcttggactgtacaatagcactacaggtactcagtaagcatttgcattttctacaagctgcaaaacagatctcaaccaaggttcgcatttttaattttgtaaagcattgccggtagacagtttgaactggcaaatatccaggcagatgctgcggctgcgaagcaggcgcaggagatgactgtagctaataaaaaataatgaaaaataaaaagaaggggtttataccaaaattctcctatcccagccttcgcggagcctagtcgacaaggcgtggcgagtccagcgcccaacgtgctcaaaaatctacagcgcgaagcgctgacctccatcatcttcgagcactgcccagcctttattatgccaacttccattagagacttccctaatctgctaggaatcgaaatctggaacgtgacactggaacgctggggcatcgaagccgctctaaacgctgacctgcacccgaaaatggcgtttctcattatggcacacgtttacatggtaactttgcccgaaggagtgttatcgccaccatttcccgatcttctttccgatatcgaaatcgtctgtacgaacctaacgaaaatacccgaagaagtggcggatgtttggaataccttacaggtaatttacgtcgagacttccccgctgcaagagttcccgactgcactattccgacttccagttagcgacgtctcactcgtcaacactggcctagaggaactgccgacgacctctttacgtcggatatgtatccgagcagctacgagcaactggcattgtcgtacaatccactcaaagcgctccctgaatctgcaagaaatgagctaagcattgacgatttgtggttatcttacacgagtctatcagctctaccctcctggattgaagcagacgtcagtgagaccatcaccctcggcggttctcctgcttgcgaagacatatcagctcaattgctcgaggtcgtggattgtaccaatagtgaatggaaccctttgaacggcgggagctatccgttaacctacgtggcatcttcacgccagctaagagttaaatacaaatacaatttaaattcttcgttacgaatccaacgatcttgacggctcaatatactgcgttgggtagcgttcttcacccagcgggtcccacgtgtcgtcattttctccacaaagaacaacactggggaattcaatgccatcagcttcacagtacggcgatccacctaacgccacagattcccagacgttggtctctatccaggcaggaatctcggtcacttgtgagtactccagtgccaagtaggaaatgtaaaagtcttcacttctagcttctggtaactttcgcaatggggttttagagaaggccaggtcgtagaaataggtggaggctgcagtgagtagaacatcatcaggcatcgtctcgaaccggttgtcgatcaaggagagctcggccaaaacagggagcgtcatcagcacagttggaaattggttcagttgcgagtgttccatgtacacgagctgaacgttaatccaagcctctccaacttcatcgggtagcgtcgtgaggttcgtgtgaatgaactccaagtctatcaactgttctggaagtggcggtcttagaattccaacgggtaggctggtcatgttgacaaacgaaaagatcatatagatcattctaggatgaaattgcgctgacagagctgcttcctccccccaccgcacaagtgtcgtgttccagagctcgatacccattagagaggagaattcctggataattggagggattatgagctccgagcagtgcaagaacatgaggctgcgcacggattcacgctctaataaatccagagctgtaaccggagggctagcaaccccctcacgatagcagttgtacttgatcacggcacaactgacattgggagcgagccacggatgcatgcgctggaggcagaagctccttatgacctccatttcaccggtaatgggggcgaactgcgccacaagatggagagtaagcatggtgatcccagtaaccaggaaaatggatggagctactacacgatgcacaaagcgcaccagcctggctcttcgaacgctcttgctagccttgactaacgcttggtaggacgcaaccgcgatgctggttctcttggcattctgcaaaagtttcggcagtgaaggttggcgtgtgttggttcgttcagacttggtagcacaatcgagcatggacgctaacgccatcaaacacaggaatgcactgaggtggggcacccccttcatcactgcgttcccccacgagatagcgaagaacgcgcgattctccaggatcaggttggcgaaggatgtgtctccatacagaagtgaatccgggaagtcgaggttcttgaagtcgaagaccaacatataagggataataatcgctcctggtaggagaatacccgtcgcaaccgagagaaaagtgtctacaaccacagccaagaagcgcaccgactgatgagaagtcgacgagatcgacggagcaactcgtttatctactgattcagattttatcagcatcctgtggataatgaacgcagaccagcaattcgtcaccagaagcgccaccttgacgtggttaatccacggccgcgctatcagggtgctgtacaaatacgcgttcgggatctgggtggctatttccactgtcttgcgagctgcaaacacgcgaccgtaagcttcgtcgttgctgcattgatctcgacgcgagtttgcggcacctaatagagactgcgagcgtcgtccgtcacgtcgagcttttctccaccgacgtactacccaattcacaagccgatcaagcgcgtacactacgagagacatcaatgacagaccgtccgagccgaaattcaccggtcggacggtcagtcttccagcatacacagaagctccgaggtgattcaggaatacgagaccatgagctgctccgagaactccaagcgcagtccctacgacgcggaagtggcggtcacgagctggtgccagaagtgtagcaaagtagtcgaggtacttgttctccatgatccagtacagcttcgcacaggccaacaggaaagctccacacaatgcgtgaagcaccatcatgaacacccagagagcaacatactgacgacgcgagattttgtcgtgggccgccggcgacgctgcatggcggatgtcctgcactcgagtaccaagcgccatcacaaatgcaagcacagacaatattttggcttggaactttgctcaggtttttaatagtattagttgttggttgttccctagataggtcaatcgatcgagtaccatacgccgattgtgcaattttgtttgggtcataccacgctttggggtgtacgcgcctccgagggtttagcttgtgcaatacctatgggaccttgatcctcgatattcttgattgctgcaagcctgggcgacagctccgaaaggtcgatctcgggggcgtttggcgcgaggaagaagtgctcgagtcgacagcagaacgtcgtcaccagcaatagtccaccgataatcaggagctgcgcgatactccactgagcagcactcacagtgctcctctgatcgttccagcacgtagcttcgtagagaacgctgagatctacgttatgttggtgtctgggcaggctcaccatgccgacaaccgcccaggtgatcgacatcagcgcaaagactgcgagtccgaacgccaccaacaccttcccgactctcgtggacgtcacgcgatgtttgcacgaggacagcgagcagcccacagctacgagtattgcaacaagcatgagaagaaacaaggacgccgtcccagcgaagaaagtcgacggcgggagcagctccgacgcattgcatgcgacttcatctcggctttcgagccaagacgcgacgttgagcgtggtcagcaacgtcaacggaggcagcagcaacgcacgtttggtcaggcgcgagcagcacgagcagcgcagacaccagagcaccatcaggagctgccattgacaggagaggcagaacaacagcaagccggtcagtcataatggttatgctaccaatgttgaagttgttgaagttgaagtgataacgtacatcgcagtcgatggtgagtagcgcctccctcgcactgagtccggcgcccgcgagcatgcatccagcagataatacaaggcagaacactacaagccagtgctgtgccggacaatcggacgcgagacccagcgcgagtcccaggattccccatacttggaggcccagcaccgtgagagccacgctgcgtcggaaggttcgattcaggtggtcgtcgtagagatcgtcgggtttcggtggagtgctggcggccccgacgcggcgacgaagagcgaacgctgttagcaccaacgccaccaacagtgaggcgtccaaaaacacacgcagccgaggcagacacgtgtcggccgctgtcattgcttcggttgcagcctcaacgaagtacgaatccgacggagtgcgatggatgtgtagacaccggagctgtacaggacgctgcgagcaagcggatctgcacgtagaatgtagcagaattgacgctgtggtggacggggagtggagtgttcgttcggcgggggtagcgagctagctttagactggtgagtagtatcggagtctaaaatagccgcctcagggcgaacgtggagggcgaagatcaagaacttgcagtcgcgagcggataccagctctttgtgaggctgcttgcgtacatggcgattgtaaggtatccacctattgaccattgttagcagtgagtgagtcgctgccagcgactcgacaggtgcagtctgctgcgagccggactcgtcttgtaaccttccgttttgctggccgcgcacgcacgctaccgaggacgtggctgaggacagctacgccggacagtgccatcgaggtcgtcgagatgacgatcaaagcacttcaacatcggcgccgagagctggttcaagcgtccaaccatgcggagacgcggtgtagccatctgccgtcgagcggaaaccagctgagaaggctccgctcgacgcaggcaatgcgcatcaacgaagaagacgctggatacatgtcggtgatcgattcaatctcacttcaccccgctttgcagacattcaaagcgtgcggctggcggcccccgcactcagcgttcgtggccggcagtccgcttctcggtgcagcctcgtcatccgtgcggctcggagtgggagctgtttggccagcagcaccgactgctgatcacgagcgtggcactttcggtgacaagtgccggcaattcaattgcccgccggtagtcagcgatgtactgacaagtagccaggcccgttgtgcggcggccgtgtagccccgggctactagcccgtgcagcatgcagcgctccgagggagatggagagccttctcctccttctccttcgtgccatcatcacggtggccgctttcgcatccgtattggcctctgcattcaggaccggccggccatcccgaagctcacttcatcgaaaccgcatgctcgcccgccctgagccgagctggtaagatgatcgtcaccgccgccgggtggctgctgctgctacaagagagagagagagagagagagagagctgactcacgaggtcaggcatagctccgcgtcgagcagctaatgcgccgccgaaccaggccgcgagctcgctggcacggtgagtagctcgacgaccatctgcgtgtggacactatagtcgcgagtgtccgcagccgtcgcggagccgagccatgagccgcgtgacgtgttctgagcgccgcacattgcgcgcaccgagatttgagctcgcgcgcacgcaccggcctgctgcagagccatctcggcatctcggcggcgaggagctgtgatgggtgatggaggccaatatggcgaaccggatcgcggccctgtcagtcagggaaccccaggaagagaggtccgcccatcgtcttctctctcgttgctagacatgcgcgggaagtcgagcgaggcgtgaccgtcgctagccatttccggcagcacttccagcagcagcagcagcgtgacttgaagcgcgccgcgccgcgcggagccgggccggttgcggcgacactagcgagctaatggcgctgggcgagctctctcgtcggtgacagctctagctgctgggggccgtgtcgccagctgcagcggcgcggacagagctcgcttgctcgctgtgttaatacaggctgttgctgctgttgagtacatgtacacacaccgacgaccagcttggcgccggcgccagactgcacttgccggcggcagatggttaaaccggccagccagccggaggcacccgttccaaagggaggtccaccgtggcacgcagtcatagatcgattcgtgccaccgatcaactcgtatctatagtgcgggcgacaacagtgcagtacctactgtaccggacgtccagactcgagtctttgacatcctctcactgctcacttgtgaattcgacactgcgcgtgcacatgaacgtcctcgccactgctgccgctactactactgcgatgcagatgcccgccaccgccggcaagaagcgcgcgctgaccgagtcgggctgcttcgccccctcgtctcctcttgctgctgctgctgctgctgcttcgaccgccgactgcagccttgtgaccgcgggccacgacgacgacggcgaggagatcctggtggaggccgagccgctgccgcacgagatcgagacggaccccgcgctgcggtgccggtacccgagcaagcactgcctgcgcacgcgcacggtcaagaagacgggcgcgctgcacagcatgtgcgcgttccaccgcgccaaggcgaaccgcaaccagcggcggctggagaagcgcaagcgcctgcggctcaacagcagcagcaacgtcgcggagagcgtgtcgctgggtgctgggcgcccgcacctggtgaagcaggagccggtcgcggtcgaggccgcgacgacgacgctgctgccgacgttctcgtcgccgagcttcaagagtttgctgctggggcagtcgacgcctccgccgattatgctgatgcagccgcggtccaactcgccgcgcgaggtggcggccgagtttgagccgttccggacgccggcggcgctgttccccgaggacctcgaggagctgtgcgagctggtggacgtgaacacgcggcagtcgcgtgtgactacgctggacgacgcggagtttctagacatggtggggcagtgcctgctgtagatgtgtagccagtgggagaagtatttagtcgagaggatgagtaatggaagttgtcgtttgttcgagtgaagttccaggatgatttttttggtttgtatgcgaaggaggcagcgctctgtcgttcgacccaagcgggggtaccccaagcagaagaagtgtttaacaagctgcgtcacgtgtgcgagcatgctttctcgggttttcccatctcgacgacgtgcttggtgacggagctcaattttcttaccaaatctctttaccggtagtcaattttggcatgtcgacgaacgatcctgcggataagtcgttccgaccattggtgcgttcaattcctacaggtatgtcggtgccctcaatcgcgtccagtgggagtagtgaagctcgaacagttcgagcctcgaagcactcatccttgtctgagatatgatgctgtgcgtgactgcatctgtggtgctgcatgcagtggtcttcgagttgaactcgggctaggaagttacggtgctctttttgacggctgcagtcctgccgatgacaccgacgggttttcgagtgctttgcactttgaacatacacccgagtcgctaaagcaagttggtcaaaccaacacaaggaactaccgggcaacgctgtcttcgactgcagcaagtaatacgtgcattgcttcgtattcgagtctcaatgttcagaatcaaccacagaatcactaatacaacttccattactcatcctctcgactaaatacttctcccactggctacacatctacagcaggcactgccccaccatgtctagaaactccgcgtcgtccagcgtagtcacacgcgactgccgcgtgttcacgtccaccagctcgcacagctcctcgaggtcctcggggaacagcgccgccggcgtccggaacggctcaaactcggccgccacctcgcgcggcgagttggaccgcggctgcatcagcataatcggcggaggcgtcgactgccccagcagcaaactcttgaagctcggcgacgagaacgtcggcagcagcgtcgtcgtcgcggcctcgaccgcgaccggctcctgcttcaccaggtgcgggcgcccagcacccagcgacacgctctccgcgacgttgctgctgctgttgagccgcaggcgcttgcgcttctccagccgccgctggttgcggttcgccttggcgcggtggaacgcgcacatgctgtgcagcgcgcccgtcttcttgaccgtgcgcgtgcgcaggcagtgcttgctcgggtaccggcaccgcagcgcggggtccgtctcgatctcgtgcggcagcggctcggcctccaccaggatctcctcgccgtcgtcgtcgtggcccgcggtcacaaggctgcagtcggcggtcgaagcagcagcagcagcagcagcaagaggagacgagggggcgaagcagcccgactcggtcagcgcgcgcttcttgccggcggtggcgggcatctgcatcgcagtagtagtagcggcagcagtggcgaggacgttcatgtgcacgcgcagtgtcgaattcacaagtgagcagtgagaggatgtcaaagactcgagtctggacgtccggtacagtaggtactgcactgttgtcgcccgcactatagatacgagttgatcggtggcacgaatcgatctatgactgcgtgccacggtggacctccctttggaacgggtgcctccggctggctggccggtttaaccatctgccgccggcaagtgcagcttggcgccggcgccaagctggtcgtcggtgtgtgtacatgtactcaacagcagcaacagcctgtattaacacagcgagcaagcgagctctgtccgcgccgctgcagctggcgacacggcccccagcagctagagctgtcaccgacgagagagctcgcccagcgccattagctcgctagtgtcgccgcaaccggcccggctccgcgcggcgcggcgcgcttcaagtcacgctgctgctgctgctggaagtgctgccggaaatggctagcgacggtcacgcctcgctcgacttcccgcgcatgtctagcaacgagagagaagacgatgggcggacctctcttcctggggttccctgactgacagggccgcgatccggttcgccatattggcctccatcacccatcacagctcctcgccgccgagatgccgagatggctctgcagcaggccggtgcgtgcgcgcgagctcaaatctcggtgcgcgcaatgtgcggcgctcagaacacgtcacgcggctcatggctcggctccgcgacggctgcggacactcgcgactatagtgtccacacgcagatggtcgtcgagctactcaccgtgccagcgagctcgcggcctggttcggcggcgcattagctgctcgacgcggagctatgcctgacctcgtgagtcagctctctctctctctctctctctctctctctctcttgtagcagcagcagccacccggcggcggtgacgatcatcttaccagctcggctcagggcgggcgagcatgcggtttcgatgaagtgagcttcgggatggccggccggtcctgaatgcagaggccaatacggatgcgaaagcggccaccgtgatgatggcacgaaggagaaggaggagaaggctctccatctccctcggagcgctgcatgctgcacgggctagtagcccggggctacacggccgccgcacaacgggcctggctacttgtcagtacatcgctgactaccggcgggcaattgaattgccggcacttgtcaccgaaagtgccacgctcgtgatcagcagtcggtgctgctggccaaacagctcccactccgagccgcacggatgacgaggctgcaccgagaagcggactgccggccacgaacgctgagtgcgggggccgccagccgcacgctttgaatgtctgcaaagcggggtgaagtgagattgaatcgatcaccgacatgtatccagcgtcttcttcgttgatgcgcattgcctgcgtcgagcggagccttctcagctggtttccgctcgacggcagatggctacaccgcgtctccgcatggttggacgcttgaaccagctctcggcgccgatgttgaagtgctttgatcgtcatctcgacagcgagtccagcgtatccatagttgccacgttttcctcgattgcatgtgcctgggattgcagccaacaaacggaaggtttaccacgcagatcgagtccagctagcagcgaactggagctgcatttgcatgtttaaccctgctggcgagtcattgagagaaagatggacaaggcgagagcgatggtttactagcagttcgagccggccatacatttgtgagctgtagcgtgcatgaaggacaaggctgcacacatacccaaacaacaagtgaacaactgttttgctttcgcgctcttacgttccaaaagtgcggtagataccatgtgaatacgtagggtgtcctaatagtactgactcgtaggggaacggtcaattagaggccacttggcgagcagttcacacgaatgctgcttgggacacaaccgaagcaagttgtggtagttctgaaaagccctcgatctccgctttttttatacggaaaatgtacagccatgttttcggattggagggggtgaaatggcccgcaaatctatcgtgatgcagagaccaaatcggcatcagtggcgtttgagaagcatgaacaacccgcaaacgtagccccgaaccaaggcttaggtctacagttccctgcctagcgctgggccggccttctaaaggttttaaggacaggtagagctacatttagcagctcgattacccagttcccagggatttgcaatagatttgggtgccatgacacccgtcctgaaaacagattgaagggaaaattccgggccgggataccgcacatggatgtccatgatttcagcatgttttacatgtttggagatcttacttggttttagtatgcctttatccctaaccctattccgaaacatggactgtagggccagcctgttttatactcacctcagccaggagccaattaaattcgagcacggagacggcaacgagtacgactacctgaaattgcctgcgtgccaattagaggccgtaaatagacttggattcagtatcagtagaggctccaacgacctgagggcgtggggaggtgataccgacagcgcgccttaggggctggttgagttcttggtgtttggtgtcggtgttgggaaggcataacataaacatgcaacacggtttgatctgattggttgaaattattttcaatagggttgaccgcgacacgactcccggagtcgtgttggggccaacaccaacagaaaggacaggcatctcacacaaaattattggatttctgaaaagccagaaatggcgcggccgctatgaacgagatcgagtgagcgcatggggcccggaaaatacgtagaacggtagcggggcggctagtgcaggggcttctgcacatgtgatgtggctgtttatacctttttgtcctgattgggggagcccagaggtgctgccatcacttccgaaaacatcacccgaaatactcacataccggtagccagaatgagctgctttcccaaaacagggacacggatgagctaaccaatcaggtagggtaggagagagttaaaggcacacgccagaaaccaaacaccaagaactcaatcagccccttacagcgcgaccaaacttgtgcatagtacatgcaaaccgcaattaccaaaagttgtagcaaccgaactgaaaatcatcggatggttcacagcggtgatcaggggctccgtctgacagccacgcattacttcagaacagcactacaacccgggcttcaacgtaccttaacctgaagccgctagatcctatgcttgaagcaatgcaagcagcacgtcgcgttgcaagtaactccgcatcagaagctttgacttcatggcctgcatcatcaacccggcctgtgttcgcagcccaatgggcttcgcgtatgacaccgccactgctgcctcaacccccggtactggcacggcctgcggccacgcctcgaaatctacactgtaacacgctggaagaagcgttgtggcagctccaactatcgtctccacggcaagctaccgtttcggccgcagctatttctcttcggaccagctagcgagacgctgcgagcgccggtttgagcgacccgctgccaccgctactaagtgtttcggctattatggcgcatgatcgactggggcctgcccgagaagataattttgaatagccagctattagacagcaggtagcaggagcgcaattgtggcacatgccttgcttggtggagcgaatgttccgaaccccagtggaagctcaacgcgggctgaacgcttttgcgcgtcctcacggctatgccattgtgtacaaagggactagctatgacaagcgtcaccggaagcggctcatccgctacggctgcgataggcacggcgttccccagagccaacgcgagcacttcaacccgcctaagcggccaaatgtaagcagccgaaagtatggatgcccatggaggtctacctcgtgcgtacgactggcagtcacggcgatatcggctggctgcttcaacatcgaggtcgggctggccaacacaatcatccgccatcctcgcacgcagcttcgcatccgatgcatcgtcgagcgtcacacacagaagccgcccgcctcgcgattgcagtggatggagaaactggcgctaccgcgagacagactatcgcacgtctactggtagaagacccgggaattcttctagtacctcgcgacgtgtacaatgaaagagctcgtgcaactcgcgctgtgctcggaggactgtcaaggatcgagcggctactccagaagctacaagatggaccttttcaagtgagctatcagtatgacgagcaccatcacttggcccatctatttttcgctcacaacgacgccattaacatctaccgagccaactacgacgttatcatcatggactgcacgtaccgcacaaatcggttcaacatgcccctgtttaacattgtgggggtgacaggaatgaacacgacggttcacatcgcccacgtatctctgatcgggggggaagagcacgatttccagagggctctacgacagctggagcatcttttatcacagcaaggaattccaccaccccaagtgtttctcaccgaccgggatttggtgctgttgaacgctctagaagaagtttcccagacacgcctgcgttactgtgtctgtggcacatcatgaaagacgttcagacccatgctcgcagggtatccttccccagagaaatcgaccatgatatatcgctactccaggactcgggagatcaccagaccttttgcgaagcatttctgcgtgtagtgtacgcataaacggaggaggactatcacttccgtcgacatgagctacatttgctgtctgctgttgaagcaacatatatcgacgacgtgtggctcgacatttggaagcggagaatcgttcgttgttggactgatcaagtgttgcatttcggaatgcacgccacatcacgcgtggagggctatcatgctacgctcaagagttggctggggacatccagcggcgacttgctgacagtacacacgcgcatggaacattggtggaggcagtcgattgagcgacactgggtgcttcactccaatgcggaagtgtacgtgcccataagacggcgcgggaaattgttcgctgccgtcatccgagttattcacacacacgtgtttctgcgctgcgtggagtcactttagcgcatggaaaccatccttaaaccctgcaccggttcgtatgaaatgacctggggcattccgtgtgcacactcgctacatccgagagtggctacatgcatcggactgcggcctaccgattttcacccgcactggtggattcgtcggcaccaacccctctcgaactcccggctagaatccttgagccagaaagaattgaagatcgccgagctcgcagagctctggagcgccgcgcttgtcgacatgcagctggtaatggcccgcgaggtactcgtcgcattccatctaacttcgaagtgtacagcaatgagttaacccaccggcgaccgttatcccgattttgctgggataagaaaaacctcgggggaaagtgccggttcaagccatacaggtggttagggtaactgcgactcttcaaggtcccgccgagagcgttttggccaatgcgatctgtttgcggatttctcaccttgaaaggtagatgagcatgggtgccgggcttccgcgacaccattggccaccgcacaagcatttacacccgcagattgccaggtgctcgcgaaggattagcgcttctccgttatggtaaaattctgagttgataggatgcaccgctcactaatgttaactttcttttcccttgtatcattgccttctatagatgccttcacacgcgcgaggtacgctggtcgaggagctacgagtacggctctgccggtgccactgcgaagaccgagttgtttcgatcgagacctggacgctcctgttcgtggaggagcccgaccgctacttcggcaatgtacgtgaggcgtcagggctactggagctttagcagaagggaggctgacgctgagagatgttgtggactcggtaggtgtgcgagctggacaccatcttcaccccccacaaggtaaggcggcgtcttggcagctttggcgttcatatctaggggctcatgctggtggtgttgttgtcgacaggcgtattacattcagaacgagctgttcaccggctactcccggcaggagctgagcaaggaggcgatcttgcgcatctgcgcccacctaagctacgtgccaccaccgctgaaaccatgcgggtgctgacacttcaccctaacgcgagtcgactccacagcgaatgtccaagcgcgatgccgaaggcacgacggcggaaacaagcggcagggaggacgccaagagcacgacagggacagcggggtgtggcaagactccaagaacgacagatacaacggcggcttgaagcatggagtcttcatggtcagctggggtctggttacggagcccacgatgccgtacgtcgactcgagtaagctcgtccgctacgaacacttcatcttgtattgggttctctagacctcgtatgacagctcatggggcgacagcggctccattacgctgtcaaactcaactgcaggacgaagttgattagagttgtgattgattttcatgcaattaatacatagctgttggtatgaccctcggcggcaatgttagagtagtgatcgtagttactgcatcgaccatcttggttcagcagcgtacaggtgtaaatcccgaagggagctgctgtaagtcatccgaacctgaattgttttcagtaacttccaccgcttgcaaaacgaatttcggcacgtattacgatgccgcagacacactcgtgttgctagcgccaccagacgttgatgaggtagcttcatgcacaaagcacgcattgccaaaaccacatcttcttcgaacacagtgtcgtggcaaaataaaagggtggcggagctgataagggagctgggttgagccaacttcgagtctggatcagcattgataacagtatcgctgccttcagcaatattgcggatgtctgcggtgacgacgctgatcttgagcaagtgtggaaagcgcgatgccctagacggtatcagctccatacctctagcggccaggtcacgttggatctcaataccaaccacacgaaatgcttgcgtttgcagagcgatttgagcgagaacatttcccacgccggatccagcatccagaaacacgtcattcacttgaatattcgcttcttcgatcagcatggacaccccagccattgtaatctccccggtatttagctgacgttcactcgcgcgcacatcacgcctggtgagtaggcagaatagtccttcagtggcgttgtaggtttcttgcggtgataggatcgaaatggtatgtggtgaaggcgaaaaccgtagaggagacgcagctttggcttccaaatgcagtcctgctcggtctggtggcgggcggaaatagcgtggggggaaactcagcacgttattgccatatcgtctcttgagcgtcttgattcgctgttgcagtttggttgcgctccatgttgacggcctcatgtctttctccactgacacccagtcgattcgtcttcccgcttgctcgtacaccgccgcgagctgaacgaattggcgatcctcttcatctgaaaagtcagccatttttcgcttcggatacgtctatacaaactcaagtaaaacgaccctttgggggttcatactgaaaccgagtttatttttttggatttgtaagtcaacgttggatcgctgtcgaccgagtcaatgtagactcgttcagagtcgacgttgacttcgctgttactgaaactaggacgtttgagtcaatgtcgacttggtttaagtccgtgttgacttcgcgatcaataaaacaagcgtatcgagtcaaagttgactcgctctaagtcatcggtgacttggaaaggtgtattcattcatcgttacgcagcagcacacaactacagcaggatggcactctcaaacgcagccaatgcttccataatcttcgcgcatacacacgcgtatctgccgtggtccatcgagtgaatgacggtacctgtcttgtcgtggaccaactcacttcttttctcccagaactcgaccgcaagcgccttgaactcttcagcgtccgccgtcttcgatccaaacgcctccttcattttgcccagaatgaagtcgcgcttcttctgcattgtgctcgtgttacctacattttttcagtccagagacaatggaagtcaatacaatgtcaaaccacactgaagcagaaactcaagcggcttaccatctcggatgacggcgttccattccgtgaactcttcgatagctttctcggtcaccgcgctatgcttgaacatactcaagtacagctctcgtctcgcgatggtgtcttgcaatccgctgttctccgttttcaccgcctctagcgcagccttcatcgattccaactgcgttctcactccatcccgttctgcttgcatcgccgccctctcttcctcgatccggttgcggttggcttcgagctctttaaacgcagctgggcacccgttgttcttgaactgctcttccaggagccgggtctggcgcttcatttcattcaaaatcttcgcctgcctcagcgatattcggcctccttgttgcttctctcgactcggcttctctcgtttctttttatccgcgtccaactgctcccgctcccgttgcaggcgatgcgttacgttctggagacgccggccctcctctttgagcttgacctcatgagattgcagctcctcggctttgacttgtagttcttcctccttgttctccatattcttctctcgtgtagccacctcgttctcccggtcctccagttttttcttgcgctcgtccacctctctcgtgaggttgctcatgtcttcgtgcacatcctggagtttcttagcatggctagcctgcgccttaagtagattgtctgcgtgcgtggggacggattgcttcgacaaattcaactcagtttccacatgggcaaatttgttgcgcaagccacttgaaatcgccttctcctcggctagttttgcagccgtcctcttccactcatgcgctatcacggtacatctgtcgccaccactgccatcaccactgccatcactcctgagttcggccagctccttcgcagcggctgctaactgctcctctaatttccttgagcgtgcttgttcctcctccagctgtcgagcccctttctgcttcttcatccagcttctctcggaactgctgcagtgcttgcgaaatagagagttcaaaattcgcatactcccctcgcaaattgtcggtttgcagtctccgagctggggcaccttcctcctgcacggccacgggtgtctgcgagattggaggccctggagcttggtctgacgctagcgatgcttggtttctggctgcggtaagctgctgagccgcctggatgtcgcattgctcgatcgccaggtgctcggctccgccacgttgcgatagctttgacgaacccgatccagcggtctgcgcgtgtgcgtctgctttcagggcttggtccgctaagtaaacctcgtagaactctttcagcagcgcaggctcgtgacgctggagctcttctgggttgtgtatgaacgccttgaattgagtcaacttgctcaaagcctcgtagtccaagtcgttgtcgctgttcctagcagctgtgtatttctccgcccacacacgcttctggtagtctgccatcttgtagtaatcacctgcctagcgccgtgggccttgccggtgctcgcccttttcgtctgcgatcttcttttgtagagccaagcacgtggaccggagcgcgtgcttgggtaccagggaagtcgtctcttcatcgcgagtcgtcgcctcgtcctccgatgcactcgcggcgcccaactcgcgcgtcgtcccgttggatccttcgccagtcttcttggcagtcttcctctgcttacgggggcttggcgaagtgtctggcccctcccccttcttccgcttctgcttggcattgccagtggcaggcgtggtcttggtagcgtttgctgacttgtcagtgggcgcgctcgtccgctttgtcgctggcttgtccgtcgcctttgcagctttcttgctcctcgtcatgggcgcctggcgagcagcaccaccagcagtcccctcgctctctgcagcctgagatcgcttcgccatcagcatcgccatcagcatcgccatcagcatcgccatcagcactttgctgcagtcaaggttctttgcgaaagtgaaaccgcaaatcctacagttgaaataaattgatgtggaccaattcgatttcgaatcaagaggactgtaagtcaacgttgacttggtataagtcgttgttgagctggcttcagtaacaagtgtctaagccagcgtagacacgttccaagtcgtagtcgacttggtgactcaatgagagacttacgagtagatgcacatggttgtctttacaaaaagatgcagaagtggtgagataagcgccaacacacgagtggatacgtcaaattagagatttactgaagctaccagtcacctcttcggcattgccggagcacgttagcgatcacgcataaactcttccagcgtgatgatgtaggcgcgcggcatattgacggtggtcagctcgttatcgatgtgcagctcatcgacggtgtccacctcgttgtcggggcgcggctcctccggtgcgttgtgtctccagatgtagaagtactccacgaaagtgcgaccagggatagcgtggccaacacgattagctcgttcgaagagctgtgttgcttccgctatgccaggggggcattcgaacgcagcaaccgcaagcttgtccgagggaatgtgcagatcctgatagcgctcaaaatcatccatccgaaggttgcagttgtcgacgataacgatatccacgccacggtcggggctgcgccacaggagttctctgcattgttcgtagcagcttcgatgcgcctcccaaagccgacttgcgtcgaacacataggatcctccgcgctggaagaagtggtcagctgagcaaatcgatgcgcggaaatcaaccattgctgcataacatgcgacctcttgagcaaacgttgtcttgccactgcccgggaggcctctcatgatcacgaagagccgaggcgggtactgcatatacgcgcggcagtcctcccaatacgcccggtagtcgtcaacgatttgtcgggctttgagctccatttctcacacgtcggatgtcgtcgaacctccaagattccgctgcttctgatgttgaccacaccatatcaccgaccatgtgtgaacacacataacataagtcaacattgacctgggatagtcaacatcgacatcttggccggaccagttacgctcctggacgatctcagcggcgtgggcgaccgtcggccagcatttcggcgagcccggccacagcgtcacggcgagcgtagccgtagtggggacagcgagagcagcatgacgagcatggcggcggccggcatgggcgacagcagcacggcgagcatagcggcggccagagtaaggatcagcagcttggtggcggccttggcggcgacggtcgatgcgagccggacgacggcatagttggggaagcgcgctggagcagtagctggcgatttcggaaatgaggtttgggattgagcgcgcggaaacgatcttctggcacggatcggagcgcgagcgtgattggccgcgaaatggctggccaaattacacgtcgcaaattcaaacgatgggggcgctgattggcgtagataccggagcgaacccacgggcgaaaatctgcgtgttgcgcgaactcaaagcgcaagttggaaaagcgcgcgaaaagctgtgtgttgcgcgaagcttgatggctgaagccaggctgataccacttcgtgtgacctttggattgagccaatgctgattggcttattagcttcaacttcaaccctcgataagcactccgaattatagtagttcttgatttagtgactgcctagtacgagggtatttcttttgcagttctatagtaacttacttttgcaagttcttcagcaacagaaatgatggcaaacggtgcctgaacgtcgctcgcctcgctacctaggccagtgtggtgtcctcacaaaacgcggaacccgtagatatgaaataccaaccaatgcgtgcacacggtttctataggtgagcgctagcaccattgatcttgtccgtcgaaaaagctctgcttctgggtggtcaaaagctcacgagacagcacactaattccctcctgttcctcgacaacactgatacgaatagacgccagtgacttcagcgaggaatacgccgcgctagctaagaacacggatggttgatgacccccccctcctttattttactgcattttactacatataggagcccacgcaccgcttgacctcccgtgccgcgccaccgccgctcgccgcctcgcccggtcaggtgcgttctgcggtccgacggtggctggtatcggtggtatggcgaaagtcgagggtaattcgcgtccgttgacaatggcgctctagggagctttgggggctgcatggagatgtcagtggtgacttggccggccgaaccgccagtgccgcgccaccgcggctcgctgcctcgcccggtgaggtgcgttctgcggtccgacggtggctggtatcggtggtatggcgaaagtcgagggtaattcgcgtccgttggcaatggcgctccagggagctttgggggctgtaacggggttacacgcacaagtggctacagtcacttgttactctaacagatgcgatgtctgttagaggtttgaacactttctcgaccttggtgtaaggtacaccaatggctacatgcatttacgaccaccacgacgggtggtccatgcacatttaggattcctattggctgaaagcagcatcttttagccaatgagtgacttgcatgttagcagaatcctgccaaccagccgttggcagattcctagtttagaatattacatttagaggaagtcagaaacataaaacaaaaatagcagctcgcatcttttaccaaaacccgctacttggagtctttatcttatttaaagtatactcgtggatctcgagtatacttaactcaagtaaaagaaacctacgcttcctcatacacgtgcgcatacgtgtaagccgtagtactgagccaaggtaggcccactacaggggctgcatggaggtgtcggtggtgacttcgccggcccaaccaccagtgccgcaccaccgtgcatcgctgcctcccagccgggagcacggtggcgcggcacgggaggtcaagcggtgtgtgggctcctgtatgtagtagtatgcagtaaaataaaggaggggggggtcatcaaccatccgtgttcttagctagcgcggcgtattcctcgctgaagtcactggcgtctattcgtatcagtgttgtcgaggaacaggagggaattagtgtgctgtctcgtgagcttttgaccacccagaagcagagctttttcgacggacaagatcaatggtgctagcgctcacctatagaaaccgtgtgcacgcattggttggtatttcatatctacgggttccgcgttttgtgaggacaccacactggcctaggtagcgaggcgagcgacgttcaggcaccgtttgccatcatttctgttgctgaagaacttgcaaaagtaagttactatagaactgcaaaagaaataccctcgtactaggcagtcactaaatcaagaactactataattcggagtgcttatcgagggttgaagttgaagctaataagccaatcagcattggctcaatccaaaggtcacacgaagtggtatcagcctggcttcagccatcaagcttcgcgcaacacacagcttttcgcgcgcttttccaacttgcgctttgagttcgcgcaacacgcagattttcgcccgtgggttcgctccggtatctacgccaatcagcgcccccatcgtttgaatttgcgacgtgtaatttggccagccatttcgcggccaatcacgctcgcgctccgatccgtgccagaagatcgtttccgcgcgctcaatcccaaacctcatttccgaaatcgccagctactgctccagcgcgcttccccaactatgccgtcgtccggctcgcatcgaccgtcgccgccaaggccgccaccaagctgctgatccttactcgggccgccgccatgctcgctgttcatctgtcgcctacgccgccgctatgcttgccgcagctatgcttgccgtgcagcagtcgctgctccgggtgcctctatgcttgccgtcaagttttctggtgagcttcgatgcctcgctgatctggagttccagcgcctcacgatgtcaatgttgacattccccagcccaacgttaaatccctcttctttacatgcacgtgggtgggtgtgtggccgtcatgcccgtcgtttcgcttctcgcgagctcggtcgtgatgcccgttgccatgtagcgggttacgtgcacggtgagtgcgacgccgagcgtgtatttatcactgtgaaaataatgttgaggagctctagaagcagtttaggacatctagcagtaccagtctatttgttattgccaaaggaatctgctaagcaattcacctgggatgtcaacattgacactttcaactcaacatcgagatattacaagtatacgatctgctctgtcgtgcttcgtatccggatgtgtttagattcgaaatttaatatcagtatagttgtatgatcaaggtcaataatgcccacgtatcgggatgcaagaagtgcgccttttgccccccccccccctccaccgtcactcgtcgagatggcacagaagcgccgagtaggcagcgggcgcgacgcccagccgccccggaaggcgtgaagaaaagcagcgaggacagtgaactccgaggcatctggtaagcaaaacgcatctttcactagcaaagcgtcgtagcgatcttacagtagacgttcataatgccgcagacgacgaatttgaagtcgagaagatcatcgagatgaagttcgtgcgtggagagcccaagtaccatgtgaaggtggaagggttacgacgagacgtcgtgggagccggaatcgaatctgcattgtcctgagctcctcaacaagttcaaggcagcacaacttcaagaggcacgcgcgttgaagaaaaaagcaacccgaaaagcagacttgcctgaccgaagtagccacatgacggctacaatccctgcaaaacaccaagagggttctgaaggtaacaagcagcacgtgtttgtcacatgctcttatgttggttttgggaaaaatgtactaactgtaataatggtgcccaggtttggaggaagtgtacgaagtggaaaaaattcttcgtgaaacttttagttttggcttgtcttactttgaggtgaaatggaagggatattcccaaacgagctgggagcctgcctccaatctgaactgccctgacaaattggagaagtttaggcgtcgccagaaagcagcacgtcaagctatgctcgaaaacccaactccagctgaagtcaccgatgctaccgggacggtaggccatgacagccctcggaaagataccgatgagaacgagaaacccagaggtggatctacatctcgccaagcaagcactccagaaaataatggagtgggagtaaccaatgatgcttacaatgtggctaccgagagccggcaaatcgatgatcgaaccgaaaatgactacgagtacgcttacccggattactttcccgagactaccgaggaagaggcgatctcaaatgcaggtggtggtgttgagccttggggtgacgggatctcaaacaatgcggatgcggacgctacgccagtaccgcgagcagattccagagggtcaggcaaggctcccagaaaaagaaaatcgccccggcagacagcagaaacaaccgcaacaccctcgcaaaatcgacgtactctttcgtctcccgggagtcgagtatctggaaagaaatcgaaaagacgtgcggacatgcttgctgatgaagtgaacgtgggtattgatgacgatcacgaggtgctggaatcggatggctgttctggcgagagtgccgacgacgattctgaagatgagtttgcagatgagctttatattgcaggtgataccggaaacgaaagttttagtgtcgaaacagcagaggaaattcgcgcggttgccggcccccaggactacataacagatgaaatgcttcgaagcatgtctgacaatggttaggagttgctaccggtaaccgacgaacgggatgactcggacctgtccggcgctacggatgtgtttacggaccctcctcaacttactgcctcggatatagaggcagcgaaaacgatgaaaccttctgatctttttttttactacatgccgaagactctctggacggcgattgccgaggaaactaatcgttacgagcgtcagacccgaccggaaagacttcgacaggcgaagttgtccattgaaaagaagacggacgacatccacaaacgcaaggaaatgtttcaagcaaagaaaaaggagctggacgcgttcaaagacgtacttgccgcggagatcatgcattttctggccctagtaatatccagggctatttgcccgataaagtctcgactggaagatcattggaagacgcgagcccgtggagcgatcccagctggaacttggtcgccgtttatggttcgcaagcgtttcaaggagattaacaggtactgtgacttccacgttattttaatagagggcccactaacacggccctcgccagatttctccactttacgaacaaccaggctccgcaggcttagacggactgggcatggaagattcgcaacgtgataaacaagttacagactactttcaagggtggaatagaactagggcgctgggttgcattcgacgagatggttattccttcaagaagttcgcggaacaaaatacgagttttcctgaagaataagccgcacaagtacggcaccaagctgttcgctgtgtgttgcgggaaaacccactactgctccaggtatgctcctttgcgctattttatatagttggtatctgaacgctgtggattcatgctcaggttcgaggtttattgcggtaagaaacaaaacagtcaattttttgacaccagaagtggaccagctgctgtggttcaaaaccttaaaagccttgtgggaacagcgtcgggtggatcgatccaagaagcgaatcatcatcactgatcgcgagtatttttcggtgacgttggggtttcgtttgatggacatggggtactacaatatcgggacggtttctacgacgcatcttggcttccccgaagacttgaagaccgacaaaaaatcagcttcgagagggatgccgcgcggctcatacattcgtgctcggaacaatacgaatcttcaaatgtactcgacgcggtgggttgactcgaaaatttgctactttgtggcgactggggcctccgctagacgtgcaattgtgcggacgaagcaaacggacggctcacaggcaaacattccgtgtccggagtttgtggtattgtacaacaagtacatggggggtgttgacagtcacgaccagttacgtctgcaaaggtacgcgttgctctgttgcagttctgccgcccatcactttcgtcgaaaatgcttgtgactaggtactccattcaaagagtcatgcgaccgaagaaatactacaagactgttttctacgggcttctcgacatagctgttataaacgcttttatcacccactgtgagtacgcgaagtcggtgggagaaaaacctctttcacacgcggattttctcattcagctacacgaggagctactcgctctcggagatgatgacttcctggaaacggtgccagtcgccgaagccgctgttaccgtggtggagccaagaactaaccatacgccagtttcgacggcgtactcgctagcaagctcaaagcatcaattgatggtgtcgacggacaagacagcgaagggcaagttcaagtttcgcgtgtgcaaagtttgctcggtactgcgtggtgctggtagtcctggatcggatcgacctcccggcacaacgcgtcagtactgcaagcagtgctccactgatcgaggaagacggtttttgtgttccaaggcgcgacacgtatccgatggtaattctgtatcgtgctttaacatttggcactcgaaatggaaaaacggagatcaacttccgcactctgaaaaggtcggacggatccgaatgcgtcggtcgaaggaggagttacgcgtggaaacgatggacacagcttcctcggatgctgtactgccaaggcaatacgagaccgatgttcagaatgccgatggggctgcttcggtgtcatcttcgcagttaccggttccaagtgtcacgcgaaacgtagaggtacaagtgcatcagccagagcggccaggcgcagatgcagcaggacaggatgaagaaggagtaactgcgactgagaggcccccggatgagagcgagcgggaggccgtggcggaagtgctggcggagttgctcggcgcggtggaatgtacgctcagcggggccgagcagcagaatgagtcggataattaggtgggagtcaatatttcactgggaagtcgatcttgacaaaatacgcctgtaagagagagcgaaaccagctttgactcgacggcggtcaagctggttgtcaacgttgagatctatgtttcactgcgaagtcaatcttgacatctgccatacaaacttaaatacaaatacgcctgtgagggagagcgaagccagctttgacccaagctggttgtcaacgttgagatctatgtttcactgcgaagtcaatcttgacatctgccatacaaaatttaatacaaatacgcctgtgagggagagcaaagccaaccttggcatcgacagcggccaagctggttgtcaacgttgagatctatgctacaataagaaagcgatgacggaatatatgtaggcatgggcttctttattacatctcagcatcgctaacaaaatatgtatgcttctgtgaagctgggctaagcactttccgacgtactagcgtctcaacgataccccaagacgaggaaacatcacctcggtttgatacgtccagacagcaagccactcgagcgcagtaacttcttggactcgagctttatactcgagctctttgaaacccccctccttggtatgctcccggatagcattctcgtcgtacgattcatctgcctccatggcgatatgatgttcaacatgggaatcgagaaaggcgtctaagcgttcaatatcccactcacacaggcgctgtcgacgctttatcatagtcagcgttatctacacagaggtcaatggcacgttagcgttgggagtacacctggcaccacagaacgcgtgaaataccttcgaggcattcagggacgcttgcaaccacgcgtagatgtgactcgagtcttcgtcattctgaaactgcgcatacatctcgtagagcggaagggcggctagaaatgcgtctacatggttggtagacctgaatctaggctcgtaaacctgttgcataataacatttgttagactacgccacagaactcaagtaattcgcatacccacccggtcgcgtgaaggtttgcgtattggctggagggtgtgaaagtcaaggaacccctggtgtcattgaaatatctccaacgtctaggcatacatcggaattgagccatcgtgatgcccactgaaacaccaaagatacgtgcacgtacctcccctacagacatcggcttgccataaattttcttgttgtttgacgctgttcggttgacatccggcgtgaaagcctgttgtatgcaagcaggacggttagatatcaaatagccaccacaagtaggacatacatgcgcaccgggacagcctcgtaggtgtagtttgggtccgagagaacaaagtaggattagcggtcaaagtcagtatcttgatcgctgagctgcccttggctctcggagcgtcctcgcgctgtgagctcctgttggttcgagcgttcatcgtcatcgctgctgctgccgcccacagtgctgctgctgtcggccgccgtgtcgtcggtgtacatacttgcgtcggccatgatcttctcggagaagatctccccacacacgatgtgtactgtaccactgaggagcgaccgcgacttttgacaggttgaatttgattgtcgctcaattctatggaatgcctttattttattttatactagatccttacactaaaacacatactcactgcatccgcctgcaaaggctgctgttgcagtgagagcctgttttggcagcaccattgggtattatagccctcatcgctgacgtcaccgccttagccaccaccattttggtcctcggagatccgcctgcttttaggcgcgctccgcactctgattcgagatcacacgatggactgcttgatcgtccggcctcgtcctgcagcgtcttgtgatggttgatgccatcgtttagcttgaacacgcgcttcttctccttcatttagggcgcctcacgcgaacgtttgtccgtgtgggctgacgtatgaccgcagcccaacagagcggctctgagagccgccccagttgtatcgataggtcttgggcgacagcgcgtagtatttgcctgggtgctgatgggctcgtagtcgaagtccccctgctgcggcgtcgggcctggtgctgggcctgcaggctgttcgggttcacgtgctgctggagttcatgcacgccgggccattgaagccgccgctggtccagagatttgtagtagagcttgggaagttcgccgctgcgctggtggtatggcgagtgtgcctggtactgcgagtagccgtagccctgcatggcgaagaggaaggaggaagtcaggcgggtgtactgccgacggaatgggggtgggtggggcttgtgccgccagcgctcgcctcgcctgcagtcgagaaacacgtcagcaatggggcaacatgctggctagagtgagcagcgtactgagattgagttgttctgctttcggttgtgcctcgtacgtctcgtcgttgcagaagaaggcgtccctcatgtgccgtgccgtgcttgccctgggatagtgtcacagcgattgccgagcacgtccatcaaccgcgatattcagctcagaacaattcactcacttagcgaatgttcgcattatcctgcgaattacgccaaggttttttcgatcgaaatctcgacagagcttaatattacggccctatccaagctttgattggataactctgaccaatgagattgtcagccggtggaacccgaagagtcggggcaggccgctggggacctcgcttaccctatcccgccagtatacaaatttctatattaatcttatccctgcaaaatcgggataagagcggtcgccggtgggttaaagctaatcgctgttgtgtgaccatgggtacgagccagacgttgtatgcgtcgtgtaaacgtcaatacactctcgagattccatactccgatctttgaccatgccacatcacttatggccttgaaaacatacgcggagccatgataaaatagcagtaaaaccatcacagatccatgatatacaactaatattcacgccttcagtacagtaacagacaacttagatccatgactacacaatagtcgcgacaacacggatccatgactgacaacttgaatccatgactattaagcagtagcaccaatgcagatccatgatgtacaacaaggatccatgactagcaccaaaacagatcctagatatacaagactgatccatggtccatacaactacaacaccgagcagatatttgacgtttaacactaatccatactatatacaactcagacccgcgatacattcaaaacaaacgatacataggaataccattgtaatagactggtagcgcaagcaggccatgttgaagccggcatacccagcgtcgtgcgagctgacggcgaagggcagagtcgatgggaagcacaggagcggccacaggattctggttcggtgcaggaaaattggccaatgagaatcggtgacttcgactggaccccagtatgaaaaaaacggcgagctccagatcggaccgaagagtgtgtgcgttgggtgacaccagcgttgacgcaacattgaaggagtctcgttactgcaacggaagcacaatcaaacgaaagtatctccgttgcttcagcacctgttgggcaacggaatgcttaatgtaataaagtagcgatttcgagtgtattattggttagttggttgtgaagaacaaaaaagacaagaagcagagacaaagacgatcaacagacacgtcgacgccaccaagactagcaacagcaagactgcccgcggcaccaagtgcagcagcccaactggtcagcagcgcagaggaggaaccaacgccggcgtcgggatgcccaggcctacagtagcaacagacacgccgactggatgaaggtcagcaccggcaccaacaccacgctcaacacgagttccagtagccgaagccagtacttgtaaggccactgccggcaggagcaccaagtttagtagtaaaattacgtgtagtacgcagacaagtgccgcacctgaatgagcaacacctacgttgagccagggtggccataaatgcgctcgccatcagccgaatccccaaggcctggataagcaagatccaagccgatactgtgaccttcatcactagacggctgacgaaagggaaaattgcatgcagcgggaccggatgaagctgtgagtccggctccacgaggcaaaagtaccaagcagacgcatgtccacactgcgtgaatacaaaaacacgcgtgtaaagtccgccaatatgctaaaaaaaaatgtatagtttactcctgtaaagttaaacccatgcgccaaagtcttcattgatcttcttcttgatcgtctcggctactggctcactacttcgctccttcgtttggcacagtagcaaccacataatgcgaaggcgcaccaagcaaacgtattccgtcgaaatagcttctccaagagactgaaagtaatttggatcgtgtatgatcgagtgcacttgcgctactacaagcgctccacagcagagagtccctggcggttgacgaggccctgccaaccaatttttttcaagggaaggaaaaacctgatgagggcgtgtatcttcgtgccacttgcggataaatcgtaacaaaccattttcccacttttgtatctccatcacctccttgtactgcccgcgacaaaagggttcatagaagaatacatttatcaccggcgatactgaatactccagaacgacaaccataactctccagtggttgttttccaaatgtacgggtaggacgacgtacttgactgaggctatgtcaacaggactgctgctgcgtgaggcgtgctccgccacagggctgggtgggaatcccagcgtgaatacaaaggtgctcaacactacagcagaatcgggaactccatcacatacagcctgacagcaagtatgaattacttgatcgttcaacatcgcgtcttgtgctacgaaaccaataatttgagctagagagattgccgagcgaccagacggcaacacgaagagggtgttcagggctcgagacttcaatttttcaagtacttcagctgcacattcgagacttcgtgtgcctggtgcggtcatccatccaaagtgtgcatcaatctcaccagcaaacaggccaatgtagtcaagggggagagcctggtttgtgcttccctaactgcgtcctacccattgtatatctcgttcccaggcacgacattgttgttttaaactgtggaactcttgcagtgtgcggacgaaagttccacagaagctcggaaagtcagaagttatcgttaacactagttcatctttcaaatcgtcgtgagcgagactctttttagtcgtagactgaccgctcgattcccgccgatagtcctccatgacagagatcattttagatactagtgtagcgggaacgacaaaattgtgtgtgtaggcttccggacgtgcccatttccgctcacaccgaggaatacggtgtgccacttcttctaatttgactgggtacgtatctagtacacgaaccgcactcgacagcatcgatgattgggaccacattataacgtcacggacgctcacgtctacttctgtacgcgacacgatgacagctgtacgcgatgtcgacgtaccaaaagtactttgtgtccgcgtagttctggttgtgttgcgttttttcttcggaaaatttagcgtctccactgcaacctctcgttctctacgcattcccacggcagaaaatgatttttcttctgtttttttgtagaggagacttcggctgtatactcggttgctggcattcacttagagtttccctagtcgtctgaattgttgatacttgagatcgaatactgtccgcccactgcttggtttcgtcgacgccttcttgtaacacatcaattgcagtaccaacttcgacttcaacaagactgtcacaactatcactgtccgaggaatcgttgggatttctatcttctacgttgcgaaccgagtttttcacagagggctgggacgataagtgctgatcgacgacctctttccacgtttctaattctgcgcaaaacttcgctgtagacaactcagacaaatgctgtaaaagaggttcgaatacacgtccagcgtatcgatacttctcgttggacgcgaggaccaccatatcagctcgttcgtggcgtttaatctttaagtactgcactttgggcctcttggattttttgcgtttaacggagggagctgcttcgtcgttggtgctggaattctgcaccgagtctggctctctgtactcaaaatgctggtgatcaggaccttgggtatcggttccgtgctcgattgtagattcggcctcgataagggatgctgcaacgctagcgtattgccgaactacgcgtaaaaccttaaccgtatcgcgcagtacttcctggacgtgagttgcatgattcatgcaccaacgttggtggaccaccgacggaggcaagaagtcaaacctttgaccgttttgagcaatcagcatgatatgcttgcacggcaagtttgtgctactgtagaagttgcatgtacacgtccagtccaggtcgttgacagtgtgtgaagaccaagccgaggatattttccaattccagggacatcttttatccggaatctcaggagtcgtgtggcggaggcgcgtgttgaattgcacatactgctctatgaccactgccaaagtgtaatcactcagttttcccgtaatttaacgcaggaattgcggaatcaattctgacattcttgagcgcgatacgtggagaccgagagaggaggaaaattgttggaaaaccgcaacctgatgacccaagattccggcgattgccttgtcaatccttggtttgtgtcctagtagaattttcaactggtttcagttcgattcgagacggttggtggtagtgttaccagtggaaaaaacaagacctcgtgcatggtttgcccacatttcacgacatgaccccagttcctatcaaagtaggcgagaagttttgggcactctcttgcagaagtttgcaaacgcatcgtacgccgtcgtatacagcgatttggtggaactagttaccgcaaaacataacacaagtctgtcagtattttcaaaatatatgatgtttgtacgcatgcttcgtacctgaacatcattcttctgaaaagctttatgatttcatctctttggccaactttgacgttgtattttcgcttttgcaggagcttcttccaataggtgatagcatggaactggcacaaaataactttcgccgacggaaagcacatctccaaagatttccactccgtgaaatctttatctataacgaacgtccttatcttctcccacgaaggattcttctccttgaaaaaatccagaacgcgaatcatggttcgttttttctcgttcagcgccagaaagtcaacaacagggatcccgcgaccgcttggacgtgtgactagaagtgaccctacgtgcacattaaactatgagtactgtacaaaatatcatctcagtgcaaattactgatcacacgctctttacctaccttaccagcgcacaacttgtcttcgtctccgtagatggtcgcccgcccggtcagtgctggagaaacgcccgcgagcgctgaaagcttgctgccattacgcgcctctattaatagtaaaccacaaatggatggagagacagtctacataatataattcttaagaggtttacatcaatactaaaatcaagtatttatattctgttgcgcaacggagcaacatattgattataaaaggtagactgtagaaataaaacaataaatttctttctagcttccgttgcgcaacggtacatacataattttataaaaacaaaacatacgagtcatgacgcatcccttccgttgcgcaacggagggggtgcaatagaagtttcactcccatcatgttgaccgaactactgctaagaccgatgcgttgtgtctgatagcaacgtatttgcttagggtgtgtccgcagcatctctgatttcaaacagagggtgagtttttcctctggaaagagaaaacccgctgcattgaggattcctctggaagcgtttgcagaacacactgatttcaatacgctatacgccaaaacccactgtagaacattgcggtgttctacagttttgttgcctcttctgctcggtgcgcacccaccctgctacgtgtgcatggttgacgtaaaatgtatataacaagttacctgttgcagaagctacacgaccaggatcgcatccgtcgtgcgactgcagagctcggggccaccgggtcacgtttctatgctacctcttagacaccgatatgctcgaggcacagaaggctttcaggctgtagagcggctgcctgcagcagttcagcgcaaatgttcggtctgaccgaccctccatcgttttcctcggctgtcttggccacctgtagcgttcactattgaggtggcgcacgcttcaacgcccaaggaggcccaaatcacagcgggagcggctgccgcaagggcatcgatgaccccttccgtggttggcacccacgtaaactgctaagcttgttaacactacagactcaaattccgctggaatcgctacgcagaacacgcagtgttttggccgatccgctgtttatgaaacatcatcgttggcaggtgtagactttatccacttgagccttgagggcttgattggtggccacgcggggatggttttctgacacgattgatagttcgcttctttctcctatcgatttcttctcgatcgcgcgggggaatttccttcagtaacatcccgtatccagctatccgagccgatcgggatcgatccttctacaggctgcgctcccttgtccgaggcagcaaaccggactccatagaaactgaaggagtgttacttgactttctttctactcgggagatggaactctgaactactctaggtatacaacacggcactatccaaacagagctgcttccatggtttcctcgattaatgagctttttgtgggagtctggcggacgtgatgtgtgatgcggcaaagcgccgatcgataaggagtaagcatgatgacaaccgttaccgtacacttactaatcagatgtagtctgcgaagtggggaaaactaccgtagtatttcgaatcgcacctctatggtgtaagtgaggcaggttacacaaaccatgtctggatacacaatgccttaagttacatatatttttcatggtacacttggttgttccaagtgataacaagtattcaaggtttatctggcgcacgtcctaacaaattgtcattacgcagacaagccccgccaccgcgtgggtaagtaaggagtcctgccaaaataaccgcctccgccaccgatcatcggagcgcactgttgttgagaagcatgccgtccgttagtgagtcagcgcacatgagacaccgccgcgccgtggataccctcccgttgatgccttgtggtatgtcaccgcgcttaccaatccaacgcttaattcatttcaaaagtgacatcagtcgtatacgatgtgatggcgaacattataccgctcgttgaaaggctggttatagaatgcgtcgcaaccgtcttcgttattagcagtagctgtgatggggaatactagtacggaatgtcatgaaggacacagccactcctggttctttctcggactgcatagatgaccgtggtaattgcgcaaaaatgtactatacaaccgcactaacttgtttccataaacacatatgaattctgaagctactacattgtactacgcgcaccctagatactggagtactcgactctgaaccggggccatcggagctggatctcaacgacctgtgttgtgacggcctactgcgagggtgctataatgggcagtattgacatcgtatcccataatttgtatatacgcttgtcgttccatcctccaattaatgcatgtaacccactcttgtgctgtctcaaccaaagcgtagcccaagtataaggtgacaactacaacagcttagcgcgaagccctgctgtaatataaacattaaaattgaactcacagtgactgttacaatactactaaaattaattattatattcattaaaacgtaattcatttatgttcgttatgtttcgtacacattattgttatattgttccgttgctcaacatatggctcaagcaacggatgaaaatatcgtcgaattgtaattccgttgcaggactgacagtgacattgaagaacggggggagtccagcgaggacggtgaggaaggagcgatagaacggattttgcggccaaggacgcagagcggagcaagaacgtgcaaagcggtggcaggaggtctctcccctgtccatcgttagtgcgaacgagtgtacgagagggccccaggaggtttgtcccctgttgggtctggacgagaacgcgtgaagcggtgacaggaggtttctcccctgttcactgtgtgcacgagcgagctgtaactgggcgagtgtgagtcagctgattgggtcacaggcggcacagagggcacaggcattgaggcacgagctgctccccgggtgtacgagtgcgggatctgtggacagttggtgggcgatcggcgaggacaggtgcagtggacgagaacgaggacgagttgtagttgttggtggacatccagcttctattgcgcttaacgagtaataacaaattgggacggacgtgcaagcggacgttccggcagggggagatcaggtggatctctgacggccaacgaggtgttaattgcgtcgacgactgcaacggacggacgcagcgtggctttacgatctgcctaacagccgggcaagacaagaggcctgtttcaccatgtcgtgtattgagctgtggtttaccttctttttgcatcggctgcattgcgcgccttacttctcagtgctgtcgtcagcgttgtcaccatcaatactaccgtcgcttccatccgcgccgtggcagttatgagcatcgtacgtattttcttttcgaaatggtgcttgcacaccttacagtacgcacctttgtcgttgttttgcttgcgctttgtagcgatcttctccttgtccgggttgtcgttgcagtatcgcacgtggttcgataaaactcgcttaccgtaacacctcttgaagcagtgcacgcatcggtagaacgcccacgcaacccgctcaaccacccccgcattgcggtcgatgccgtcaacattcaaacacccttgaatccgtaagttgcgcttggagcttgcctcttcagcatgtggcaggtctcctcggtagacgagcatgtcaccgggttgcatatcgtcgagaaccatccaattttctcgtagcacgttgcccgcaaagcccccggtacaacagtcaaaaccgtttccggctcaagcacaagcaggaacgaagcctgcacccaactctctcgcattgatcgctttagttgtctcactcgccgagaagtctcggtgaaggcgctcagcctcagcacctggttgtgactcaagcacagacagctgctcgcacacactccacgacggatgaagctaggacgcatacgcgataaatcgacccagcacaagctgaatggcggggtggaccgaaacagcatcggttctcatgtccacatccatttggcgccggttctgatcgcccaaatggcaaagccattgacgtggatgacttgcgttaattgcgcggagcacaatgtcaacttcatcatcgctcaaaataccaacgacaattgagcatccccgattccacaacgttgccattattgtcgtaatggacgtagggctggttgcatcaccgtgtcgctcacttgccacagccgcatcttccgggccttcagccgtagtatcattggtcacgtcgcgtcctgccgatgcgctctcgttgttgctggcagggcgctaactcgaagcgcttccactacaaccggcccattgcccccgtcttcatgagccacggcaaaactatgaggttctgcaggtttcttgcttttccggcacttcgacttagtggcgctagcaccgttcccacttgaaccgatactattggcggcggcagggttcttgctactcggtcgagcacggcccccggaacggctcttgcctcagccgcgggtagccttctctgcttgactaccagccctatcggtgctgtccgtgctcgtcacgccagcggtagcaggtccacccttgtcagcgctcgcatcctggccgagatcgccgtcaccagtgctaggggtctcgtgcgctcgggcgtcgacagtcttcttcctacttcgtcagtggctggcctcatcgacgtcggcagggggctcggcaggatcttgcacactcgaatcggacgaagcactccctccggcgccggcctcgccagcgcccaagatcgatcctgtgaggtgcaattacccggcagggcggggtccacgctgcccgatttgatagatcggccacatgcgctggagaagcagcgcagcctctgctgtttcgctcgctcgcgagcacaaggacttccgcccaggttgtagccgctcatgaacactactctctgcaagtctggtatttggctgacgtcaagccttcctcgtcggccacaggcctagccatgtctacaggtctagagatggctacatttgcattatattggtaagttgctttagcctggagaagcctacgtttgtctaagatgaactcgcgcagtggcaagtctaaactaacacagactcaatgatgccgcaccctgtaggtacacactgttgcacgtgcttcgacttcttccgcgcgccacttggcctcttggctttgccagcgtccacctcttgtagccaggcatcccgaaaaataatattgcccgaaaatataacagtattttcggatacaatactttatttagggcatcgccgtttgttttatccgaaatttatgtagccgagttctaaaattcggtattttacttctgctcatcctgctccaaccattagttgtggtcaaacatcgcgctctaccagcgtaactttgccgttagccctcactttcaaacaagcaccacccagcatgcgcatcacgactcgacgttagcaccaagatcgacaatctcctcgctggccccgctccgaggcctaccttctcgcccaggcagattgctgccttctacttcaagccctgcctggacgaggagggagagacgacgggctactatgcctgcaagacctgcgctaagcgccgcaagcacgcgcccaagtcaggctacagcaacttggtgtcgcacgtgcgggcggcgcaccccaactacgagagcgacatgcgcgacgctagtgtcgctgcgacgggaccctactgtcgtgggtcacccagaaggcctcgaaccgctacgcgtggctgcgctgggtcgtcacgggcaatctaccgctgactttttgcgagtccaaggaaacgcgacagtacgtattttcatatctattttggtgatatacatgtgtgctaatgccgtatgttatgtagatacacgaagctaaatcccatctccgtggagacgctgaccgccatcatggaggccgtgaccaaggccgtggagacgatgatcggcgacgccgtgcccgagcgttttggtctggtccttgatgcccgagcgttttggtctggtccttgatgcccgagcgttttggtctggtccttgatgggtgggcccacggcacggagcactacatggcagtgtatggctgctttgagacggcgacatgcccccagtacctgctgctgtcgttagcgcccgtcatggatgaacctgacgaccagctgagcgctgacggccatctgacggcgattaaaaggttcctacccttttttggtaagtctatctccggatgtctattcctggttggtgacaactgcggagtaaacaagcggctggcgaacctactcggtgtgccgctaatcggctgtgccagccaccgcctgaacttggcggtgcgagactacttggagccccacgacagcatccttgaagaggtccagcagcttatgcgtaagttgcggactttaaagcaagcagccaagttgcggtaagtactctgtttgctgttttatttggtttttgtattggtactaaattggtctttgtttttgggttttgttcgaaattagtgccaagaccccattggccgctgtcctcagacaggacacgcgctggtcgtcgaccttttcaatgctcaagcgctattttcggctccgtccgttcatttcggcggacgacgaggagctcgcggacttccttccgtcacgctcagcccaccgcaagctggatactttgttggcaagcctccgggacgtcgagtccgtgtccaagcacctgcagggcgacggccttacgctgctggacgctcgggtcctattcgacgagctcctcaagagccacccctccttcgcgaagtatctcggtaaggatcatcgctcactctgcgtctgatggtatttctactaaactactgcgttttatatgtttttatttatgcatagccaccgatgcggatatagtccactccgccgtcttcgagcaggcggtcgtcaaggccctgctgacggacgacgaagtcgctgcgctggagccgttcaagcgcacgcaggctcatgtggaagacgtggactgcacgccggcggacaaggaagggttcgctgtgcgtgcgctcaagcgacgcaaggtagctgctgcgccggccacgtacgagctgcttaatgcgattcctcctacctcaaacatggttgagaggctcttcagcattgcgcgcgctgtgctgcgccatgagcgccaccgcctctcccccatgatgctagagatgatcttgttcctcaagatcaacagctgggatgttgcgaccgtggagcagtgcctgtaagtaggtacagtcgtaacatgattgcagtaatttactgtgtcaacactatgtcttacgttatttatttagtctgctactcggatgcaatgcaatatttattatggtgtccggcaaaaaatagatatatatcatattttcggcatgcctgcttgtagcacggcgtgtgtcagcaggcggccgcctacggatacacgcttgcgcttggtgctgatgtccttggggggcggcgctggaagcgtcagagcttcatcttggacaatctcgcgcatatgtagccacgcagcgagctggacgtgacgaggggctccgttgcgggcgaacgcatcgagtcgagagcccatcttgaccagcgacagtggatacagtccacaggccttgaaaccccgcttgatgttgcgactgatcttggcccctctccacgccatgcccgccacgacgatggcgtcctccttgctgatactgtagaatccgctgtcttcttcttcaaccagctcgcctatcaggttccggatcttgttcctgagcgtggagaacaccgcgacatccaacggtgcaggaggtgcttccgtttggtggtaggaatactagcagaatcctaaagtgcgcagctgcatccaccaccttcgctgagtagtgcgaagcgcatatgtccaggatgaggacaagagggcgttgaactgaatcaggcaccgcaacagaaaaaactgtagccatacctcgaatagctccgtgttcatgaagccagaaggcgatgacgacacagcggctcctggcgcctcacagttctctagaagccgtgatgacactgtcttccccggcaaaataaatgccggaggcaccacgaatccagcagcgcttccgcacgccacgatggtgaggtgaaaattcgccgtaggctcggtgctccaaacgttgctcgaccccttgaccgctacgactttcttgctcttgagttgtttctgaaacgccgtctcgtccatattaaacacacgtgaggcatcgagcttcaactcaatcacgagctttgctagcgtattgaaaagcatagttagatcggtggggacgatgcagttgcgcttgagtgacagcgcctgcgcagttcgtcttgtcaggacgggaaagcgctctttaaagcgcctgtaccaaccttacccgacactttcaccacaaccgaggagagcgaccccctgagccttggtaatgatcacagagcggctgacaggatggccgacgagctaccgaccgatgacccagtcgcagagctgctgctcagcaactggggggaagaacggcttcggcccgggcctcgaggaggcaagcgacttgccctcatttgctgccgccagccacttccgaatcgtcttttcgtggacgccggtcgccgtagcgactgtggtaacagcgctgcctgcttggacttcaccgattatctcttgcttcctctcctgcgtgtaggtattgaccattgggctgtgttgctttcaaaatgaagagtggaaagtagatggctggttcgagttcccgcctaaatttccccgccagttgttgtattttgaacaggtctccccggcaaatctggaatagcgatgtcgaatgtacctcgcagagctagtacagttatgcacacgagatttgcgcttgctggatgatgggtactgagtttagtgaaaaatggagggaccaggccttctagcgggaagtgcaagttgctaaatagttattatagcaggagtgaaactttcactaaagttattgctgtagcacgatgcaaacatgacggcatacggtttgggcgacagtaccttgccctgaacgatggggcagtacggacattagaactccctaaacgaccgtcccaggcagcggtctacgtgatgcgatgctccgcgaccaagacaaactcttcactatatgtacaagtacgaacacaagaatatcggatattcggcgatacagtattatatcgccgacccccctcaacgaccgcgctctgcttgaaaactgagccgacggtacaagacgaggcgctactttcccattaattgagtaattcagtacattgacacttctgtcaagccctttgcaagtttcgcaaccttgcagtttctattggtccgacctttccagatttgcgggggcagactgtataggtttcgtacttaatattatttctacgaataacaagacagaaagcgtcctcactggtcaaaaccacgacggccccgaattgaccaaacggcccgagattggccgtttaccttactgcaagccggacacgacccaacactgttgggccaacagtgagaggagatatcgattgggctgtttccccattcttcatttccattcatccgtggactttgcggtttgccacggtttacggccgtgggctacatacacatatcctgaaccacaggtagcgttcgcgccagagatgcctgggcttaatctgctacgctcgcggatcttaaatcgcacgaatagttacagcttggcattgagccgctttgacaataaaaaatcaccctggtccccaaaacccccttaattctgagtacacaaaatgcaatgagttgtgttgaagtgagcatcgagttcgcgatagatatgcccaatgtgagcagatataaaaacccctctagcctgtcaccaggtagtatataaaagtgtatgaaagcaaacttggtagctagaagtaggcatagttccgccgtcgcacgaagaactgaacgcgaaagcttatcgcctttaagccgcctgcttgatggcggtggcaagctgcacgaacacaccctggtggtgctcccactgctgcttgacactgtttgcatgctcagcgttggctccttccgcttctgccaactgctggacggctgacccgccacgctgcagcagggcctgaagcgactcagcacgcgcgcggttgtgcagaacgatggacagcgactgcacgtcgtggccgctcagtgcccgctgcaggcattcggtcagcagctcggcgggcggggcaggcgggacatacagcagcatgagcaccagcgtctggcacaggcggtcatcacccgcatcgttgacatcattttggcgaccgccgtcagtccgtccggacaggaggtgatccaccaggtgaggaagcaacacaaaccgagccgaggggtgcagcaacggcagcgcgcgactcaccagcatcttccccttcgtcgccgtcagcatcctctgaagttgctggacatcacagctcatgacgccacgagaagcagcttcactgtcagcatcggccggctgcgtaacaatcacaccgagcagacccgctagctcaatcagcagcgacgtagtgcgcgagcgcagctcaacaagcgcagggtccatctcgtcctcgttcatcgagtggaactgctggacattgatgccacgcgcatcgagcaagtggcgagcgtcctgcagcgacagcaggcactgcataccgcgatcaagttggagacgcagcttccaggtatcgttcgcgaacacggagtttttgccggcatcgtcactcatgcgaaggaccttggcagcttgagcttcggcagcgacagcctgggcaccggggcttgagccgcgaacgtgcttagggctggcagcttcgctgctcgactcggccgccgcgggcgctgaagacgtggcctcttcctcgccaccactggaaggcgtgcgttccggatccgcggcattcgtcggcgacgaagccggcggcgaggtcgtttcctccttgcctgcaaggttgagcagctgcttcggccggtacaaactgctcttggcgttgcgtccgaggacatggtactccgactcccagttgcgagacttgacttcgcgctgcacatcgcgcgggtccactgacttgacgtgctggagcttccacgacggaagcgggaccgacgggcggccgggcacgccagcacgcgcgcgcttctgcatgtagttgtggaagtagtagtcgtcactgaatgggtcgctcgagcgcagccacttcatctgctgctgcatcacaaagttcacgtcacgcggtgtcatcatcttgaacgcaggcggctgcatttgcggaggagggcgaggcattccattgcgtccgaacgctcccgggggtccagggaagggcgggcgcataggaggcggcgggccacgcccgtagaactgcggggtcggcgggccaggaggatacattccctgcggcggagggggcatcggaggaccctgcatgtgcatcgggtgcggaggccggccttgcatttgtggcggaggaggcggcatgtactgcatctgctgctgctgctgcgggttgggaggcgacataggaggagccatcggcggcgcaccccacgcattcggcggctgggcgttctgcatgggaggcatcggaggtgccgggaccggaggagcctgcggaaggggaggcggtgtctgcttggacggcgggggcaccgcatccacgaccgagtcgtcgtcatcaagccccagtccacgaagaccaggcacctggctctcgtcaagctcagagtcctgttcgaggctcaacccaggcggcgcggcgcgaccaccggcagttgaagccgccgtcttgtcggccgtcgacccgtagaacttctcctcgagtctggagaactcctgctggcctctggcccacttgaggtcttccgagggcgcggccagtccaggcggagcgctcagaccgggcggcgcgcggccggccgcgcctccactgggcttgttgcctgccggagctgcgccggactggaagttgcccatgaacacggccgagaacgcgtcgttgaagaagagcgacgagccgccggcgtcgctggccttggcgccgctctccacggggcccaggaggtcgtgcgcgcgcaggtcggccagcagcgactcatacttggtgtcgtccacgctgccgttggtgaagaaggccggcagcccgtccatggacgagccgaacagcgattcttccgaggccatggcgggcgggcgtcagaggctgcttcaaaggcgggggatcgaggctgcacgcgggggtaaaaggctgcggaacgggcagatagatacaaacagagatcagcactttgtgcaggatgcagggagcgcgtgtagatgcaatttatatggccggagagagcagacagcggcgatcatggcggtgtcactcccccgaccaggtcatgttcgtgagcagcagcacagcgcggcgtacctgaggtgctgaagcgaggcttcgtggatgttgtggccctccactttggctatggggagagcctggggactactatgtataattatggagcaatgtatacttaattaagagggaacaatatcattttaaagaggtgacagcgagtgtccaccttatgtagccattattaccgatgtggacactttactgcaacttggtcttcttggccgcgcgtttcgccttgaagcgcttgagctcgcggacgaagcccagcaggaatggcaggatgagcggcgcgagcagcggcgcgtacacacccagcatctgctcctgcgggaagtagagctggcggatcatggtgtggtcgtagtacgcggcgtccgtgagctccgacgcctggcgcgccatggccagcagactgcgcagatccgacacctccacgcactcttgccgctgctccacgttgctgtcgcagaggatggcctcgagtcgagtgacggccgtctccacgcgggtctgcacgcgctccagcacgctcagctccggcagcgtctccacgagcttgacagtcgactgcagcgtctcgatcgctgtctgtatgagtttcgtgaatcggtcgcgcatgacgacgtccagctcccagtcagcaatgccgtcggcaggcgagggcaggaactggagtcgccgagtggcatcctccttttgctgccgacgagagaaggacggaacgccgagcagcgtgcgcaactcggatacgaaaagccccatgacgcgctgcagctcgcgctccttcgtcttggcagtcaacgcagctatctccttttcagtagcgttgacagaaggcttgccgttgagcgcgtgggagttcaaaatgacggcgattccccaaccaggcagctcgaaagacgtcgccaaactcttctcttgaccatcaggacgaatagacagtggagcgtgcgcaggatcgggcagcgcggccatgaagtgcaacacttgctctccgtcgccgagcaccgaggcgtccaggaagtcgttcgcactcttgaactaaacagcaccaaacgacaaacacgacgtcagccacgtactgacaagcccatgatcaactcagcctcacctgtttgagatcttcagcgttgagatagaactccgtcccatcggcgctcggcgtgacttccttcgccagtctagcatactgcacgatctgggtctccacggtgaagttggcaaccgctccaaccttctgcacgagcttccccaaataccgatccacaagcgtctgcaggttttcattccacggggtcgtggggttctccttcaataaagagaactgcagtcggtagtgcagcgctctccgcgccgtcctcgtatcaacattcttcttctcgctcttctcgtctgcttgggggtacacatggcgcgtcatcagcgtctcgatagccgagtgcacttcatcccccttcgtcacttggcactgcgaagaccaagcgtggcgatgtttcccgaccgtcagaactggagcagaccccgccgccttctcgtcgcagagcaggaacacactgaagcgcttgtgctgcgtgttcacaagcgtctgcagcgcatcgtccgtggcttgcggacccaactgcgcggacttttccagcgtcttcttctgctcaattgttagctctaagttgtgcgtcttgtacacgacgttgggggcgctggaaggcggcgcggaagatcccgatcgcacgctgtagatatcgacctggaatgggtccgtcccgccgaagcgcgacgcgtcccacgagagctgctggatgcgcgacacgggcagatccacgcgctccacctgcgtgaggtgccaggccacgggcgccgccagcagcgcgaacagcacgaaggcgccgacgatctgcagccgcgtgccggccatcttggacgcagaagtatcaataagcgttgcacgatcgtaaccggggttacgccgcgagggtacagtgcattaccgcatttagctagctgctctacatactctaccagcgcgtgcagacctcagtctcgactgactgagctcggctgctatttgaacttgaagcccttgtgcttgtgcttgtagtgcttgcacttcttgtgcttgtagtggccgccagcgtacacgacgcctgggtacgcaacataagccggctgcggggtcagagtcgcctgcacgaagagctgtcgaccctgggctgcgtaataggcctgagcttgctgcggcgggggaggggaggaggatacccctgctgtggtgggggggtagtagttgccgccgtacatgccgtcgactgatggaccgatacctggaagcctggaagcgcgccgctgctttagtcgactggatttgttgtgtggtggcttcaacactgagagcgtctctgtgcagaaagagtacccggggtacgatacacaggagtaaccaaggctacgctcgatacaaaacgccagttgtcggtctcatttcagtcgaagatggcgaggcacgatcaaaacgagtcggtgacggacacgcccgtgctggaggaggcgcctcgggccgagccgcccagtggcgacaccaacaaccgcggcaacttcacgcgcaacctgaacaaggaggcggacgagagcatcgccaagaagatgttcatcggggggctggcgtttctgccgtggctgcacctcgtcaacgtcatcttctaccgcaagcagttcatggacccgtccatcgacgccaccgtcaccatgtgtacgcctatatgtgcagtaacttcatagcagcacaggcccaccggagcctagtctcctgatacagtcgtgctcgtgctcgcattgagatctcactgttattgtgacatttgttgttgttacctttaggggtgcgccgatcgttcatgggtttctgcttctggacggtgctgttcatttcgtgggtcctgctcttccagctcaactggaaggagttcggctggcagagtctcgtcatggtcgtgcccgacgaggacgagaaccccggctggtgagcagagcttttcgtcgcagtatcgcaccgccacgaccacttcaggtgtctatcgacattgtactatgcttctcccctccattccgtcgctacagaggctggtggtgagctccgcgatctaaaagctgcgtcctagcgacactataattcatgcaagacttccatattcaaaagttaaacgttaaactttgatttgtctcgttttgattggccggatgaatcactatgtggtgtacataaggtaaaatttcgagctggatctcgctccccaagttcacaaaaggctcgagctgccaccgaagcacagagcgccagccccgactcgaccccagctcggccaccatgagcgcccccatcctctccatcgacacgcagcacgaggacatgatcgtatgtcgtgtgcactctgtcctccctctttccgcacgctcttgcggcgcctctaacgcccataaactactgccaattggactaattcccacctctcatcggtttaacagcacgatgcgcagctggactactacggcaagcgtctggccacgtgctcctcggaccgcaccatcaaggtgtacgacgtcacgggcgacgtgcagaacaacgagcagatcttgacggggtacgtgcgtagctcagtagctcttggatctattgacaattatttattgcgcggcgactaagtaattgttcttgatactgtgttgccgggtaaattagacacgagggccccgtgtggcaggtggcgtgggcgcaccccaagttcggcgtgctgctggcggcctgctcgtacgacggcaaggtgatcatctaccgcgagcagagcctgaaccagtggacgcaggcctacgtgcacgccttccacgagtcctcggtcaacagcatcgcctgggcgccgcacgagtacggactcgcgctcgcctgcgcctcggctgacggcaccgtctccgtgcttagctactcgcgtacgtgttcagctgcagttgactcgagtatcctttcttttctagtgcggtgatttactgagaaatggtgcaatgtcgtggttattgcagcggagggctggagtgtgagccacttcaaggacagcgcgctgggctgcaacgctgtgagctgggcgccgttcaattcggtgggctcgcagggtcccgcgggcccgatccgccgtgtggtgacggcctcatgcgacaagacgatcaagatctggagcctcgcggagggcgagaccgagtggacgaagcaggaattgagctccgttcctgcgcacagcgactgggttcgtgatgtggcttgggccccgagcacgggtctgcccgtgaacctcattgccagttgctcggaggacaagcacgtgtacatctggtcgcagactgcggaggacactacctggaagcgcgagctgctgcacacgttcgacgcccccgtgtggcgtgtgagctggtctgttacgggcaacgtactggccgtgtcatccggtgaccacaaggtcacgctgtggaaggagacgctcgacaagaagtggatgtacgtattcctgcctctgtatcgttttgcggtggctttttgctgatactaaccttgcgtttgtgtgctgtttgcagtcaaatttcgtccgtggacgaggctggtgccatccacaatggcaacgagtagatgcgtcttgcgctgttaggagactgaagccccggtgtaaaaggcgttgatttcactccagcttgacttgcgcttccctttccgattgcccgcaaattgaattagacggcaggtgattgatccgtggtggggattcctcctccgttggaatgaggagaggcgagggcggtgagcatccttgacgccacgcagcactatcgacaagaacgagtaatacacatgcgtacatacctatcccagtgtttaaatggtgttgtctatggcttacagacagcaacgaagccgacaaactcttcgttcccgcctgaacatctatcaagctatactacctgtgcgtacgtgcctgcctactcttcaaagttacgcgtccaccgccgctggaacttctcctcgagagcctgcacgcacttataatgaacctggtgctcgtggttaaagctcgacagcgtcatctggcgctcggaggagcgcgcctcctccttcttccactccgggtcggacggatccagcctcttgctgatcaaagcgctatggcgctgctccaccgtccgcaagtatccagcaatccacacatcgtcaactgtcacacagaccgacgggatgtcagccagagcctccacgtccgagaagaatccgcgtcggtaggcattgccgcagcacgcctgtaagatatccacgtagcggccgcgaggacgcatgaagtacggcacgtaggcgggcaccacgcccacttcgtgccacatgggcagcatgccccatccgcagacgcccagagcatcgtctggcttggccacagcctcccaggccagcgacgccaccagctccgcagggtactcgaagtcgtcgtccagcgtgatgatgagcgtggtcgggtcgtcctccagcctcaaggcacccagcagcttggtggccgggccgtcgtccatgcagcggttgaccttgaccagcggcgcgagtcccacgagctcggacgggatctccgtctcgtcgtacgagcgctccgggtgccgcttcatggggccctcggggatgttgacatagatctggtcgggctgcagcgactgccgcgtgagcgagcgcacgctgtccatgaccttgtcgaggcggctgggcgtcgtggtgagcgacaccacgacgcggaagggcgggcgccagggcggcgacataggcggcaagtcgtcggccaggcggccgtcgtacgccgtcgtgaagagcgccgtggcggcgggcgagatgctgccatagcgcaccaggagctgcgtgtagccccagcagacgaagagcgtcgcgcccaccagcagcgcgcgcagcagcgtcacgtggcgcagccacgagtgcgggtggtgcttgctgtggcggggcagcacgggctgccgcatgaacacgctccactcgcgagccatgcgcgccagcataaagagggaggaggagcttggggactgccgagcgagcagctccgaaaccgataggaaatggatgcctttgcgtgtgacacggaccatctggctgcaaccgtcgcgtcatcgacattttggtgtgtgagcacaccacatgctgcactacaggcgtaggctatatttagattctggaaggtggttttaactgccgttctaaaatgggttcgggaattccatcaagtagttttatgctgagtgcaggttatgcggtacgtaaacataccgttcgacgcccattgtactgatctttaacccgctaagtaagtacactaagtatatacacaaatgttacaccatattgtgttttgatacgtagcacctggattctcaactcacaactacaagggccgggcatcagcggcggcagtaccaggatgaacctgttcgggcgcaagtcggcggcgcccgcgcgcacggggcccgtggcgacggccgagacgatccgcaagctgcgcgagcagctggagtcgctggagaagcgcgagctgcacatcgtgaagaagatcgcgctgcagctgcaggaggccaagcagaagagcgccgccaaggacaagcgcggcgccatcttcgcgctcaagcgcaagaagatgtacgaggccgaggtggagaagctgcagggtgcgcgcatgacgctggaaacgcaggtcatgacgctcgagagcgcgcacgtcaacatggagacgttcacggcgctgcgctcgggcgccgagcagatgaaggccatccacggccagatgaacgtggacaaggtggacaacatcatggacgacatccaggaggagatggccacggcggacgagatcggccgcgccatctcgcagccgctgggctcgcagctctacgacgacgacgagctcgaggacgagctgcgcgagatggaggagctcgagctcgaggagaagacgctggagcccatcgccgtcacgcccgcagaagctgcggtggccgcggccagagctccgcccgcgcctgttgcagcagcaactgcagcggccgccgccgctgcgccttcggccccgctcgctcctttagcgcagtataatttgccggacgtgccaacacacaccgtggaatccaacatcaacgtggtgggcaacgcggacgaagacgagctggaggcgctgcggaagctggaggcgtccatggcgttgtagcgcgctagacacgcatcaggtcataaagaaacaaagtgagcagtgagcaggaggaagaagactggactcgcacatggtgacggaactgcgcgtactactatgagcgagctgagcttcttcagatatgtatggcaataaacggaaatttggacacacgactgacagacgggtaatgctttgagttgggcagataccatggctgcactcgcactgcactgcacgtgcagccagctctctctcctctcgtcgccttgctgcctgcttcttttgaggctcctgtctgacagcagccttctctcctgcctgcctgcgttgcatctatctcttgacccactggaatttcttacgggccttggcctgaccagccttcttcctctcgaccatacgcgggtcacgcgtgagcagtcccgccttcttgagcgccgggcgcatctccgggtcgaagttctgcagcgcgcgggcaatgccgtggcgcacggcgccagcctgtcccgtcatacctcctcccttgaccgtgcagaccacgtcaaagtagccgatcttctcaaccgtggagaagggcttgagcacgtcctcgcggtgcgtgtcgcgcacgaagtagtcaacgaggtccttcttgttcaccttgatgcggcccgtgaagggctgcgcggcgggcttgacccacacgcgggccgtgctggttttgcggcggcccgtgccgtacgcgcgacccttctcgtccagcttgcgaacgcgcacgatcttgtttttggcctcgtggaaggcgatgcgggccgacttggcgcgcatcgcgcgctcgtcctccacgctcaccatgttgcgcacggactgcagccacgtgggcacgccctcctccgtgacggcgtcgatgtcgccgtcgaagccgaaccacttctcgccgtcctcggcgccccagcgctcctcgtcgaagtactcggcgttgtgcgccaggaacgcgtcgaggcggcgccgccgctcggccgtggagatgccgtcctcgtcgatgggcagcagctcctccacctcgacctcctcctgctcgtcgtccgagtcgctgtccgagtccgagtcgctgtccgagtccgagtcgctgtcgctgtcgtcgtccttggaggcgaagagcttggcggcgtccgtgttcttcttgttgccgggcttgtcgctcaggaagcgcgcgccgggcaccgacacggcgttgaaggcgggacgcacagacggacacagcgcactggccgcagcgggggccgccgcgcgcgccacgcgacgcgccgtcagcagcagcagcttcatcgcgagtaggtgcgggggaatgagaggcgtgaaatggctcggccggctatggtggtgtgtggaggagaggaataacgccgtgtcattggacgaaaaaaaacaagtatgacgttggggaggggaaatgtatgcaacaggagaggatttgagggtgtagccattttccatcaacatgcccccaggctgggggtacttgcgccttgcgagcttcttgccttttactttattgatgtcgatttttttcttagtgtttctgcctccgtgcctcacttctctacatggtacaggtctacaaggccgctcactcggcgatggtctgaggctgctgctggggcggccgctgcgccttcatgacctcctggtagagcaggtccttgagcgtctgcgggtcgtacgacacctgtgcgtagtcgaactgggtgagcttcgtcgctacatcggcgtggcacggcatctccagctgcgggtcgcgccactggctcacgtacgggtgctccagggcctcggccgccgtgattcgcttggccgggtcgaactgcagcagcttgtccagcaggtccagtccgtccgggttggcctccgggaagacctgcgcccagtccaccttgggcaccttctggctctggatcaggaactgccgaccagcgtagcgacgtgccacagggttatcgcagaagctgaaggtcgtgggcgtgcccacgatgtccacaatcaccttgagctggtccacgtaggacgtccccgggaacataatacgccggcccagaagctcggcaaagatgcacccgatagaccacatatcgatagccttcgtgtacgcgttggcgagtaggagctctggcgctcggtaccatcgcgtgaccacgtactcagacagtccttcagccaggtcccggtcgttcgcgtgccgagccagcccgaagtcgcagatcttgatccgacagtccgagttcacgaggatgttgcttggcttgatgtcacggtgcaagacgtccgctgagtgcaggtagtgaatgccgcacagcatctggtacaagaagtactgcacttggtcgtcgctcaaactctccttcgagtggataatgcggcacaggtctgtctccatgagcggctggatgatgtatagatcttcgaagtgctcgtaatccaatggccgctgcagttcgtgcaagcccatgaggcacggatgtgtgccgatttcactcatgagcttgatctcgcgtaaagccaacagagccaccttcggatgccgcaggaactggcccagcttcttgatcgcgaacgtgccgccgtgaacaaaatcgctcgctgcgatcacctcaccgtacgtaccctttcctacgatcttcaccattcggtacttctcagccaactgataccgtacgccgttgatgacaaactgatgcatgacgtcctccccaggtggagaaaactgcttggtgaacgcgcggaaactgttccgcgtcgacgagctttcgaacgacgccatcgacgcgaaggaaggaggacccatactgccatcatctgacccaatgctgtcccgatagctgtcccggaagcttgacgtcgacgaccgctgcgataccgaccgatgggacatggcggagatcgtgatgcccagcagcaatttaccgaagaagctctggtggtcgttggacagcacgtaggagtgcatctcgcctactctcgacgcattgctgttggttttccgacggctgcgtcgacccatcaaccgactggaaattgtcccgcccgtggtggcgaaactgctaacaccactgctgccgttcaagaagcttgcaagattcacgtgcgtgcgcgccacgacctcgtggttcgagttgcggcagcattcaatgagaagcaccgtgttgtcatcgcgcgatagccgatcaaactgcagatacagctcctgctggtagttgtaggaccaagacgccagctcgcttccagatgaatcgccggggatctccacaggggcggcagctcgagactgcgcctccgtgtgccacacgccttcaaattcgttggtatccagcgaacagcgtacgaagaactcgtcgccttgcaactcgtgcgaccgaacgtccgtaatttggtgcagattaatcgaaaccacataaccaccaaccaccgactcacggatacgctcagccagcgacggtagcgtgagattcgtcgtgcagccaggggctttgaacaccacgctggaggccacgacgtcgccgaaaatctcccagcggctaacgcgcccgttatcattcggcttgaagtgcagtttgtgcgtccactgctgcataaacgtagtttggttgtaccgcacctgcatggtttccctcccagagatgacgaccaccctgttgcggttccgggggggacgagactcgaaatccggggcctcgtcgtgctcctcgtcctcctccatctggatgctctcgacaatgaactgctccatctgcactgactgggacaacctggaaaagtactcgagcacacctgcgtatccacgatacttgccttcaaacggcaccatgggcaggtagttgctacggaggatcacgtctgacttcagcagcgagaagaagcggagcagcgcgtggtccatcggcgcgaccacgttcgtcttggccatgggttggttgggcgtgaccggcatgtaggacgcggtgggcttcttgccgctcggcagcgccagtgtgagactcgatctgtccgtgtcctcggacgatccgacgcccggagtacccggtccggttgcggacggcgagggaggcacatccatcctcactcccccttcatcggccgacacgcgcgcacacagagccgcgtagaagtactcgtagcccgtgtaaaagtccaccacgttggtccgaaggcgctgcacggccggccgcatgtgccccgcgaggtcatagtccgcgatggcgttggccacgaactgcagccacacgtgcttgctggcctccgagttggtgcggaagtgcagctggtggcccttgtgcgtggccatggtgaacctgaaggaggactcggagtctacggtcgctgctgacgacgggctcgtagcggccgccgccgcgtcgaccgcaacctccggttgcgagccagcaccggcgacgggtgtggaggcggcagagcccgtctggccggagctgcccccggccggggtctcctccacgtcccacgccttgacgagcgacacgcgctccgagaagccgaacttgcccttcttgatcttggacttggcgttctggcggcgcgcgtcctcctccgacaggtagcagtacagcgagcggccgcgcagcacgaagtagtacgtctcccagtgcttgagccagtcgctgcgcttctgcaggtagccctcccagtggaagcgcagcggcacgtcgttcggcacggcgcgcgcaccaggtgtgggcgtggccaggctgcgcgcgtggctcgcggaggccggagagatggacaccgacgacgcggaggacgcgcgcgacttggaggtcgacaggagcagctcgcccgcggctgcagtcgacgcagaccgcagcgacatgctcgggatctgtgtcatcacgagcgctcaatactgtctagggcgaaggcagttgctgaacccacgctgaatgggccaatcggcgcgtgagtttcttaaataaacgataagactgcaagcacaaaaaataagaaacaggtgacccggggtttattctactggtacagtagagacgcctgggcagggcaaacacttgtcaccactatcaccagactgcgatcccatgtgtttttctcgtcttgtaatctgacggagcgttacagtatcaccaagctaacgcaagccatgttggtggttgtgccgtggtctgcacatgacgatagcactcacacggcactgaccgagaggaatttccgtaagtcagtaaatactactgagattttgtgttgggattggaaaatagtattctgcacaactgcttctggattactattttcgaacatcagtagttctgggatgtcatcagtatttctaaacaagtcattatcagtcgtgctgtgttgtctaaaccactacgagattacaatattacaatatagcaatagtacgtgtataagtgcgtatatttttttatttttcactcttaacgccagtcgcactcggagtgagcactgcatctactcgtgaacataagtgcgtatattgcagcttcgcagttgaagcagtgcttcagttcacagattatttactatgtaatggaggctgtactggggcatagttatcccgcagtcccaaatatttctatggttttctcatgggtacaactaattaataactgcaaaaaaacatagcccttgtagtgggatttaggataggccaaactgttacacacattttcaattcgtcgaatcggttatcgcccaacacaaagagcagttgaaaatatgatgtcctgttgggtcatttgaattataatacgaagttctagagttgtgagtattgaatagaggcggcattgacagaggactgctctccgctagccccccatttgattgcagcattcgctgtagactctgtaacaccgaagcagttctagaaacaggttagtggctatcagaggcattcagagctcattcgaacatagtaggtattacaggttcgaaatagtcatagggcacgataattactactaaaaagtaccgatgtcttacaactctaaaactataggcagtaaaacgcggggttctaacgcacacaccaacaataggagttaactgcacatggcggtatggtaactcgcttagctaaaatgctcgtctagttacaattgcgcggcaggtatgtatgaacgtccaccgcctggtgtgcgatccagcatttgatgtctgtaccttttaaggcaatatgttgtactgcgggttgttattctgtctactactcaggggagagtccgagtgcattttgattagctctatttgcggtaaaatgagaactcagtccagaacacatacgagtatcgaaattctcaacgagagcgattacatagtgtttttttttcatgttctaatagatgcagaatgtaaaaataacattaccaccgatacatgtcaagattgcaatatccccccgctaggccttgcttggcgtggttcgtcaggcacacgtgctcgtacgagcaggtgctagtcaaacagctacacactgtcgaggtagtgaaggccagtcacgactagcgccaacacggaggccaagagcacgtgctcagcttaatgtatagtagtgcagtactacatgtattaataatactatagctgaatactaactcgtcggaaaagtactgatcagtagtcttcctggaacaaatccaaatctgcaaatctcagtagtatttactgacttatggaaattcctccactgaccgatgttttttttgggaactggcagcaaaacgtgccaaatcgcttgtgtatacagtgcaaatagtttgatcgagtcgatatcttcactaggcacatcggtactgaagcgctttcaaaactctgtattaatactagaaagcgttctctcagtacagccctgaaatcgctggtcatattgagagcacgaactcctggccgctgatatgagaacttgtcatatcagcagtcatcgttggacaacactcgccgcaccctgaccgggatcaccaagggttcttgccctcgtgcatcgcgaatgtgatgccgagaagcagtgagctggccttgtcgaccaacctcggagaagtcaccgatctccagatccagcaacccgcagagcgagtgaatatcacgaaagtttggtctagctgtgtccgagcagcaactgtcaagtaacagtcgggcggcgccggtctccgatgcagcttacagcctctatggacgacttctgcgccgagctccgggaagaacttctgtttgccctcgtctattgctattctgctacagggcgcatgacccaccgcgaactgtgcagaccgaggagaccgtgactatgatcatctcgagtgccccacacacgaacggacggcagctcaacgctgcgtggtgatgcaaatctgaagttgaagtgtccaaattggaccaaattgaccgtcaaaataacgttaagatatattgtggctttcatccgttttggcaaatcgggtggtccaagatccgatatatcgggcccgatttgctggagggctccgatttagcaggaggggctgagggaagcaaactatatctggaccgatttgcgtctggggtctgcgagttgcgattcgcaacttgcgaagcaggggccagaaatgccgcttttcgccggcaaaagggaccgccgcgaaaacatgtctgggaccctctcagatcagcgtggcacggagttgtagcggccgtagatgttcacacaggtgatttagatggccatagtgctacgaagtggctatatacagtgtactattgtccccaatgtcttgcagttctaatgcgtcatgagatgtggagaggtatgtccaacttggaatgcctcccctttgagtcttatgctactggacgcctaccagatatacattaacgggctgtcatacctgcagcagatatgacagggcttaaaaagatatatgttgacatagcgctcaaaatctccaccgcaattgtcgtacatgcgtcacttgtgtccgcttgatatcgccctgaatcaggcggcttgatagacgcttgctgggctttaagaaagtacccgtcatttcgttccggacaccgccgacgctgcatcccttctaaatttcaccagtttcgaatttggcgcgcgtcggacacaagcgccggagcgatggccgcagaggatgtcgatgcgatgctggtgctggctagcgccttcgtcgagcaggaggagacgctgcacgaggtgcgcagggaggtgtacgacaagctcgtggaagagaagtggaggatcgccatgcggaccaggcactacctgaccacccagtgcctggacacgccctgcgactccgcgtggatgatgttgtacacgcgcggaagcgacatcaacttcctaaacgcgacgagctttaccaggtgcgaccctacttactatctgaagttgctgcgctatatctaattcatgcatgctttcaggtcggctttccaccaactactgcggcgcttcagccgcttttactatatcccacgcagcacggcacgcgggcggcccccgaagctccgacactaccaccagatcctgggcctggtgctgtgcttctacgtcgggtcgatggagcagagctccctgtgtatgatgtttggggctccgccgagcaccatatcgaggacgctacgccgcgccgaggaagcgctgtcgctggcgctaaaaggctacgctcctgccagaatctcttggccctcgcctgctcgccaagccgaactcgcaaagcttgtggaagcccgcgagccgcttctcaaacacacattcggcttcattgatgggaagaacttaagggtgagttgtagtttgcaaaatgttacttgctatgatagaatgttaacatcaatgatattgtaggttcagcagccgtcgaatgcggacttgcagaacgccatgtataacgggtggttgcacaccgttttcgtgactggcacaatctgcttcgcagtcgacggctgcatcatttggtgtaagcacaattgccccgggtcgtggaacgactccgacacctccttgggcttccgttccaagttgctcgaccctaccctctgcccggacacacgtatggacgtggtgtcggactcggccttcccgtgttcgaccagcatggtcggtcgcatcctgactcctctcaaagatggcgatctcgagaggattctcccgtcgctgagaagctccgcgcggacgcttcataacgccatcacgtccgtgaggcaggcagcggagtggggcatggggagcatgcaaaaggtgtacagccgcctgaacctccccctgccgtatgaccccgagcttcgtgggcaccggatcaacaacatcttcagaatggctaactatcgcgtccgcacggtcggcatctcgcagatacgcacgacgttttcaggcgagatggagctatccagcgagtagggtgtcgaactagccgtgcttgtactgcatgcaacaatacatttttctttgccgttgaattgagctgcttcattatctcgatgttgctggcagcagcgtgctgcaaacgtttgcgacggagagccgaactcgatgctcgtgcgtcttgcacttgacttcacagagatatgtacgcagcacgagaagtacatgtgatgatgaaggcgctagaagatcacgtaacccatgacggacacgctagcggatcatgaacaacatgtttgatttgaggcatagtggtaagtgacaagtatatagtaactagaacgtgaatgatagcctcacttcgaagagcatgcgcgccttccgctcacgccttcttagtcagtgcgccgatcaatatgagcagctcttgagtgcgggcgcgcgcatcttcgcgctcacggcgcgcacggtcctctctctccagcttctcctcacggcggcgcgcctcagcttcagccttggcttccagaaggcgggcctcgttggccgccttttcgtcgcggtggcgctgatcttcctcggcgcgacgggcgtcagccttccgctcgatctcttcgcggagcagcagaatcgtctcgaggatgcctcctcgcatgttgctggcgttgttttcaaggccatccagctttgtcttgagagctgttgttgccttcatggcacgggtgtgcttagctttggcgtagctagcttccgctgtgtctttgtcttcttcatgagcacgcttggcgcccaccgcgtcgcgaaagccggccaagtccacgcctccgagacggttcgacgtcttgtggagcttggggtacttggccgcttcggcggcatcgtggttggtggcagcggcggcaccttgagtcgatggctatcactactgggggcagtaacagccgccttacgtggtggcggcagccctcccgagccagcacgacgtgtacttggcgctgctcggacaggagcaggacgcggcgtgcgtgcaagctcgtccagatcatcggtggtcagcggcgacgagagcaagtcttggaacgcgcctcggctcgatgagcggctggaagccgtcgactcgtcctcggccgactcgtcggagcccggcgactcgccgcagtcggacctgcccacagtggcggcagtgggcactcccaaaccttcgccctcgccgtcgccgcactcgtagaagctgtcgtccgggtcgacttcaaagcagaagtcgggctggtcgttgtcggcctcgtcgtccatctccacgacgttggccttgtcgtcgatggcacgcttgacctccttggctttcttgatgagcgggggggggggggtctcctgcacgccggtcggcttccgggtgctgtgaagcaccttgaacttacgccgtaagctctcgaagtctcgctcgggcgagcctcgaggcctgttggcgttgtacgtcatagcgaggcgttcccactcgtccctgccgagcggcagcatcttcttgacgagcgtgaggaggcggtcgacatcggccgtcgagtagttggtggttccagagtgcttgggcatctacacacacagacgaatcaataaaaagtcagacacgctgctcattgccacgttggaccgtgttggcgcggcgtaccgggagtggtgggcggaggcgaggcggcggagacgcgcttgggaggggagaactggtaaaaccagaagtgagagacgacgacagcttcgccgcggcggcagcttgccagggcgatgccttcgccgccaccagttcgcatcgatcttgaaaggatgctagtagctcacaacttcaacgctggcgcgcgaaatctgcgcgcgcaattagcaagtcagtgtacgtgaaaacttcgaacgaagatgagtccatcaacccgtcgtttggcgcgaaccttggcgccagtttttcatgcttccctgcttgttgctagcctgcagctactttgcactcacggcaaccaccatcaacaaccgcacagcaataggttatctcaatgcaattcatttgttcacaacacgcttacctacataactacacctcctccacttcgctccctcccccttctcgctggtctctctctcttcaccttgcttgctctctcgtcctgctcactctttggccctctcacgggtcttggtcgtcttgaatgttgcggtggcgacagccatctagcccacagtggcaaacaaaccacaagtcgtcgccatagtcgactgtcacctcctcgccgcggtggatgtcttgcgtcgacgccacgaccacggtggtacggcggccgttggccacttccacgaacttcgccaccggttggcacgagtggtttacgaagcgcatcagccctcccatgttctcggcgttgatcgccacgcagactgggaacgtcggtcgctctggccgctgcctcatcaccaagcggtagccgctattgcgcggtcgggtcgtgcgcgaaacactcaagtgctccatctcgccgaggtattgccccagcacttcgcccgcttcgatgtcctcgccagcgaccacgcccaacgaccatgtgcgcacgttcctccctagatacaccttgctcgactcggccagcgcgttgccacagagcccccccccccccgtacgggcagcagttgatattgcagtagagatgcattagcgaattgcggcaggagtccacacggcacggcaatgggcagtcgcaccacccaaagtgaggcaccgacggaaataccgtcgcgagcgggttgaactgctcgcgaagctgaatcacgcggtgcggccagtgcgctggaatgaaccgatcccgtgaccgcggcccccgtagttgcgtccgaggcgatccgtccgcagtgactcgcatcgccccgcgtgggttgatgacgggtcgggcatcgcgctgaggcaccgactgccggcgagcgtaaggcgcggcagcttcacgacgcgcacgacggccctcgtggcgaggctgaagcgccgctagggatctcggcggcgtctccaggagcaccggcgacgacgtggtggggctggcgtacgggcggctggacaccggttctctctggcggtagccacggaggcgttgctgtgcccgtagcgctggcggactcgctggcgtcttcgatgcggcgcttgctgtcgcggtcgtactggtggctgggctggatgttcggcggcgtgttctcttcgtcctcgctggacgtgtcattgatgcaccgacgccgccagtgaacggcggagtgggttaagcgcaccattgtccctgcaatcaaacacgaggtgagtcctctcatagagaagtgcatacaaagccatcaaccacgctcacctttcgaagtgttggctgctgtcgacttcgcgccgccggcggcaaattcgcagcttagcgtcttttcgatttggcggaagatatatgatcatcgatatgcccgtagagtgaaggatgcatatgttagaatgatggtcagcataaagtatactaacaacaagacaaaactttatgatggctacacggcatatatctaggggtagggcagtttatcgagacgatatctgcgtcccgcgagatctatgcgcgtatatgacgctgcatatcagctgtaagtatgacagccccttaatgtatatctggtaggcgtgcactaactcaggtcagatatagctaaattggactaaccgatcatgtgggagctccattttatataaatcggactccgagataacacgtcaaatcaggcggcaaaatagttgaataccacaataatatataagctcaaaatggaccagagaccaaactggactaaaatctatactctcttctttttacagcaaattcctcagaaagtcttctttcatcttgacgcgatgagccgcaagcgcgagtgcgagtggagcgagaccccgcggctacctgcgtacgagagcgacacatccacatccacggatgcgcctgacagcagctcggagggaggagaggccatcgagaacgacatgaagcggctgcgcgtcgcctacaactacgacggtacaatacctccttgctgcacttgatagaggccccgagttgaacctagcatttgtattgtaactatctatttgcaggtgctcacggcgtgcgatgggcgggtgaggccaccgccatggacacggaaatggaggtgccgcgagcccgagcggtgcgcaacgactacgcggaagccaacgcaatgctacgcgaattccactacctgcggcaactgcgcaagttccaagcggagcgcggccgcgcgcgtgccagctacttggagcggcatgaggaggacgtcacgatggcacaggaaccgcgggtataggcctctatgttgataagaatccaccttattattttaaaaactcgttaaaatgaagagctgcaagttgcagctcctcgcagcctgcaacagtcgtccaagtgacgataccttttgctcagcaatggtgatcgaatggtgagtcacagtgacgggctctatcagctcacgatgccccagacttgcacgactgtagcaacgactgcaaagcaaaggctgtagttcgaatggaatatattggttgtgcgtgcggcactaactgtcgacacgaagtttccctccctgtctagagatctacagcagatcgataactacttacgctatggaacacgaagctacagtgcttgcgttaaacagcacagcgaacccggtctgcctgcctgcttagggtagctccgacgtcggcaggttggcggcgaactcgcgctccttctcgaacagagccgacgacaggtaacgctcaccgaagctgggcaggatagtcacgatgagcttgtccttgttctccgggcgcttggccagctccagactggctacgaccgcggcgcccgacgacgggccgacaaggatgccctcctcgagagccaggcgcttggccatggcgaaggcgtccgggctgctggccgtgatgacctcgtcgatcaggtcgcgctcgagcacgcgcggcacgaagccggcgccgatgccctggatcttgtggggcgcggggttgccgcccgacagcacggggctctcctcgggctccacagcgatgatcttgacactgggcttcttgggcttcaggtaactggccgtgcccgtgagggtgccgcccgtgcccacgccggccacgaagaagtccacctgtccgtccgtgtcgcgccagacctcggggcccgtggtctcgaagtggatcttggggttggccgggttgtcgaactggcccagggtcagagccttgccggcctccttcttgaccatgtcctcagccttggccacagcgccagtcatgcccttggcgccgggcgtcagcacgacgttgcagccgaaagacttgagcaggatacggcgctccatcgacatggtgtcgggcatcaccagcgtcagcttgtagccgcgcacggccgacgcgaaggccagaccgataccggtgttgccactggtgggctcgatgatgtgcgtgtccttggtgagacggccgctcttctcggcgtccaggatcatgctcagaccgatgcggtccttcaccgaggcgcagggctccatgaactcgcacttgacggcgatcttggcgtggcagccctcggtcacgcggttcaggtacacgagcggcgtgttgccgatgagctccgtcatgtccttggcgatgtggagcgagcgcgcgttgcgcagcatggcgcggcggccggcgatcagcgagcgggcgagcattgcggtggggaaggaaggagggcggaggtgtgtccggaacgccgcgggttcaagaatgatgaggcaggtgatggatcgcccaaacgtacgtacgccacacatgccacgaaggactcacagaggaaatgtattggtctgatcggaccaatgggagagcggcgcacttcaacttttgtgaattttaggtaaggcggcgcgcgattggtgaatattgacgtcgaggctaggggtgcatcgcaatctactgagaccgagtgaaagtgaagagactggccgttccaggccaaaactgcttcggcggcagggacacgctgtccaccgagacgccttcaacatggtccacagagcatgtctgtccgtcgactgcgaggtctttcggctggcagcgctgtctttacaagacttttttgcgtcgcttggatccgaacttcacagccaatcaaacgcgcggatccaagcaacttcaacttgtgatttgcaacggttttattcgtctccttggtctcaactttctcgtctcatgcagcgcagagaacgatcgctcttcacatgtcaatgggggggggggtctcattgcgttgctggcgcatgtagtggcaacttgctggttctacctgttacaagttgcaacaagccacaatccagacagatagtccattcgggtcgaatcttcccttcggcctggcaatgtcgatcccgtcggacgcacgccacgcccgaagaggtcgcgctctactctactagtcgagagcgataagatgagagacgcaagcccacgtgtatttaggaaaaataccgacactagtgtgctctactcctctagatctgtcactacttacaatatcacaaaacatggaggaaccgagggaatcatcacctcggcacctgcatgcttgaagtctccgcggttatacgacttaggccgcgagctccgacgtctgcaggttggcagcgtactcacgctccttctcgaacagtgccgacgacaggtaacgctcgccgaagctgggcaggatagccacaatcagcttgccggcgttctcggggcgctgggcaaccttgatgctagcagccacggcggcacccgacgaggggccaaccaggatgccctcctcgagagcaaggcgcttggacatagcaaatgcctcagcactgttggcagtcacgacttcgtcgatcaggtcggtctcaaggaccttgggcacgaagccagcgccaatgccctggatcttgtgcgggcccgacttgccaccagacagcacggggctctcctcgggctccacggcgatgaccttcagggtgtccttcttcggcttgaggtagcggctggtgcccgtcagggtaccgccagtgccgacgccagcaatgaagatgtcgacttcgccgtcggtgtcacgccagatctccgggccggtggtctcgaagtggatctgcgggttggccgggttgtcgaactggccgagcgacagggccttgcccggctccttggccacgagctcgttggccttggccacggcacccgtcatgcccttagcaccaggggtcaggaccacatcgcagccgaaggacttgagcaggatacggcgctccatcgacatggtgtcgggcatcaccagcgtcagcttgtagccgcgcacggccgacgcgaaggccagaccgatgccggtgttgccactggtgggctcgatgatgtgcgtgtccttggtgagacggccgctcttctcggcgtccaggatcatgctcagaccgatgcggtccttcaccgaggcgcagggctccatgaactcgcacttgacggcgatcttggcgtggcagccctcggtcacgcggttcaggtagaccagcggtgtgttgccgatgagggcggtcatgtccttggcgatgttgggggccatcttgagcggatgaagggggcggggcgggtgttgggcacggcgcggattggagagtgagagctcggtgagcttttgcgcagctgggtgcaagtgtgacgtaggatggcccggttttgttgagatatccacgaagtgataccaagcaccgacattggtcgatattattggcgaatcccggcgcctccaaagttgaagtggtccgctgcgcgctgctgattggctgcaggccgaaggtatgcgctggtcgaccatcaccgcagatttgcatcgcgtttgaccagcaatcgcgccctcaagctgcaccgctccagcctgggcggagctacaagctagtaaggcactgcacaccgctccagcctggggaagctacaagtttgcaagacactgcacacagctccagcctgggggcaggttggacgtgggcaggctgaccgccgttcgcggaaactggacagcatggcatgccgacaacagctcgacaaccagccgcgttgaccgtagtgagcgagttcccttcggagcgttggcaatgatgcctggccggaaaatcttcggtacgaaaccagggccaataggggggctccgctggatagtacagcgctctcttcgggttccacggcctcgacttcgaacagtggctcgcgcccgcccgcgatggcccctcgtcgtgtcgaggaggatctgtggattggctgggttgaagaactatgtgagcatcagcgccatatccaatttctgcgcccgtgtagaccctttcggcttgtgtgaggactaggtttcgccgaatgcagcgcttgggcaacatggactcttgcctgcatgcaccctcgaatggccgctgaagcggcgagcacggagctcagtcaggttattggcattctgaagcgagcaagctccatgctgcgactggggcgaagaagcatcttgagcaggcgtcgacgaggttgactgggaaaagaagtcctgggtgcgttagcgcgctgatgcccaagctgcttcctgagcgggtcgtccgccaggtactgacaatgttgtacaagactccaacccgcagtggaacggctgcaagcacttgctagacggcgagatggtacacgtcaacttcaacacggactgcagggcgcttaatgcgctccaagtgacactgcgctgctgtcggaaacatcgtgctcccagattggctgcactacctcgaacgaacgagggaaaacagcgtcctgctttagtttggccactgtagacttggtagcaactacgccccaccaccatttcttcttcataaactctgcattactgcgttctgcatcattatactttctcttcttgcaccgagcgagcgagcccgaatgcacgaaaattcacctatacaaacagcgctattccaaataccgacgcttgaccgtaagccggccgctctccggatttagatatcctcggatgaggaaccggccgaagcggtttttacccttgccaagcacagtatagcgactggctgctggttcctcgtcgtcactgtcactgtcgtagccgtccatgtcctcgtcctcattctcttcatccgacggcggcatgggcaaaaactgcaagtccacttgatcttctcggatcttgaccaacgtcccgttgaactgacgcagcttaaagaaccctgcgtacttgccggaaactggacgcttgtcgtccctgcgacgtgattgaggaacgcgagtgcgcgaagtgtactcgaacgggctaacgctctcgatattggcaaatgcgtcctcgctgaagccccagttccccacaaagcacgcacgtcgattgttgcgcacagcataggaacctctgagaatcggatccgccgcgtccgtctcaaaaacgtcgaactccgctggaatagttggcggcggaatcttgcgcttgcgcttaggacgtctctgggaagactcgggatctgcatgacgcgaccgcttttgcttcttgtacttcagaagcttgcgtggaccggtacccactggcgcctgccgcttcttcagtacacgacgcacatgctcatcttccgacgcggagcttgcactgctgctggaggaagacgatgacgaggatgatgacccagatgaagcagagctcgagctgctgctactgctacctttgctggaattaatgacaagcatgtccccactaccgtcactgaggtggtcaacgttattatcaccaggagactgtgtgacgcccgtcagatcgatggcatcaccaaatatcacgtcgtcggtggtttctgataagtccagcacggagggcgcttcaattgcgaccccctcgtcgtcatcgtcgtccccgtcaaaccattggtactcacggttctttgtcggttcggcttctacgtcagcatctgcaccatcatcatgctctggaagtagaacatggtcatcgccttggtgcgcctcgagaagttcaaacgcctcgtcagcacttaggtgaggcatattcgggctgctgagcatcttgggactactgtgcatctttgggctgctgagtaactttacagactctgcatccacagatacagtatcatccaagaactccaccacgttatccacaagcgagtgaacaatctgccccaccacttcggtcacctccaccacccttagtcgaggcgctgcatcattcgtcctctgctgtgcgttgtctgcgtgcgtctcggtcgcatcacttgaagtcatctcaacgtcttcacttgcactcgtgatatctccgtgtttgtcacttggagcagcactttccctcaggtcctgagggctagctgatccttcaacctttccaacttcctccacgatatctcccttcgaaacactcgtgacctccttctgctcgcagacgacctccacggcgatcgtcgtctcctccgttgtcgtttttccagccaggttaccttcagcaactgtagatctggtcttttcatccaactgcatcataggtgcaccacatttctcgctcccatccacctccatagcaacaacggtctccttcaaagtagcagcgacatcaacaatagtctcctccgtcgcaccttgaccaactccaacttccaccagcttctcaatagtctccgaaggttcttccgtcgatctcttcttctctgcaccaacttcaacgtgcgccaccgactgctcagacgccaacgtgtcttcctgttgttcaagtccttcagtgtccacgtccacaggcacgggcgcgtcctccagagccactggatccgccgtctttccgtcggtatctttgtcagtgcctgctgctgccggatctgcgctcacgctgccaaccgagacaacatcaggtagctgcttgggcggtgcatcttctgaacctgttgcgatctccgtgtttgccttgttcatcgacgtatggctgcttttctcggtatccaactcacttgaagcctgttctcgacccttctcgacgtcattgcaaagcggtttctgcgccgatttggacgaaacttggttggccatatgcgccgcattctcgctcgtcggagaggccgcctgtgggcgctgctggtgctcttccgccgccgccatgctcacataccccgaggccgccgctgcttttcctgcgttggatccgccgcttctttttttctttctgtagccactcgcctctcaaaaacaagatcgtacctaagcgaaagtcggtccatgattcgtcgaacatacttgctgcatcgcgattggctgaaatagctcgtcggggcgaccactggctggccggtgtcactcggtaattcgcctccggaggagctaagtacttacgtcgccatgatcgtccctgtgcgctgcttcacgtgcggcaaggtgctggccaacaagtgggagacgtacctgggcctgctgcgcgccgactacacggagcgcgacgcgctggacgagctttcgctcaagcgctactgctgccgccgcatgatgctcacgcacgtggacctgatcgagaagctgctgcactacaacacgggcggtacgagctcctggctccttatatctgaagataaattgcggtatatctgactatttactggtgctttgtctttatttgctgcagccattgagagaggcgacgactgagtgctgaccagaccagacgtcgacgcgtgagagcatggagaccgaagagctacggccgctcttgtgacagtattatagtcctccttccctactttaaatcgcacccagcaccattcatctttctcgactgttcaactttgctatccgaacattactctaacctctgtctcaatatctctcaacctctgcgcagctagccagccaaccctgtcgtgaattctatattgtgcgagtttagatgaagacgagcttctcgatgatgtcctgctcggcgtcgcgaggcgcgtcgtgcttgatgaagccccagtgccgcagcgtacagaccgctcgaacgaaccgtgccttaaaggctgcgtcctcgctggcgtctttcgccttcctcttcttgctcttgctcttggatgcagacttggactcctccttcagctccgctgcaaaactctcataccactcgcgaagactcaagcttgcgctcgcgctctcctggtagaacaagaaggcgagccccacgtcgtgcacccacgaagtcttgacgtcttcgtcgttgctggtgtcgatttcttcgccgattccagcgtcttgcagcacgttgcgaaggttgtcgtggtattcgagccgcagtcgctcctccagtacgttggcgtccatcagcaccgaccaattttctaccagtgcatttgcaggggatcttgaacggggcgtcggtggatgaagtaacgcagtgatgaggcgagtggtaaacaccgtcacaagctcttcccgtaatgcttccaacatcttcggcggagttttctcagttcgagcataagcacacaacagtgctagctcgcccaacgtcgtttcgaggtcgtcgtcgttcagtccagacgcgcgaaatgacgaacgccagtcctctatcatcactgaaagcgctgcccatcgagtgcaattctgaagccgtcgaaggacttccatgaagcgtggtgcttcgccgagtcgaccctcgagcgctagcgccaagtgcaacactgccatttgctcctgcttcccggtatagtggccattttccaagcttccttcgatgcgcacgtccaaccatgtacaagcggagcgaaagcactgccaacccatgcgccagcgagcgtgtcgatgacgctcatgtagcaaagcttcctccagcaccgttagccaattctcctcaccagccccggatggcaaaactcgtgaagctaagtccgccaactccaaggcgctgcatggtgcaagccacgatgccagagaggaatcggactcaatcggctttccttgtgcttcacgggttaaacgccggcgttgacgccttacccaggtggagacacggtggggtaacggagtcccattagccgctaccaggatgggggatacaccaggagaagacagaccatctacagccagcgatagaaaactccaggggcaacgccggaaatgtgtgaagagtaagaagcgcagcgctaacaagaggcgcggcacgctcggtaagcggtgatgacggctcgcaatagctcgtaatacctctccactgagagcaaggggcagtcttgctttcacaactaacgactccagtacatcgtcaaagcacttccgcgagtcaacaagcgagaagaactgcagctcgaggcggttagtcaccgtgagatccaaacgtcggagcgccggtgaagttgcagaggccactccgattacgaagcccagcgtgcagcctacatatttcgcttgatgactttcctggtggtgtcggacgaagttcgtccagacctccagaaattcacctagcacctgctgcgagaacgcttcaagttgctcgatacagagcagcagaaatggccgcggagagggagaggacggtgctggcgtttgaacttccgcttgtacgtcatttcgcttgagtgtatagtcgctctcatggctaaagatgcgctgcttgacagttttccgtcgttcccggacaacctctcgatcaagtgtgcagtcctccaaaaattccgcgtactgatacagcacacgctgcaacatccgtgccaacgccatttccgtactgccgatatgaacagtggtgggactatttggccccgcttctggtgccacattgagcagttttgccgctgtcgtttggcacgtagatattgtgcgctgcaaccacattaccgcttcgtcgtaacacgcgatagtttgaataatcacggcgtcctccttctcttgaacctccttcactacggccaacgcctccagaatccgagcttgcaccagttcaccaagcatagagacccattcgcgagcagtatccccactgttaggcgataccagttcatcaatatcacgttgaattgccgtcagcagcttcgacattgtccatcgtccatacgccacagacggcagccgccgttttcgcttcccccttcttgctacttcatcatcgctgtcgctaccatccgaactcgactctgaaaagaagcttgcgtcgctgtgtgcgtccttctcttcgtcatcctgctgtaccccggatgttgcacttgcattcgccttcgctagctgctgcctcgtcatcctctgaccgacactccccgcccccaagggcggctgatccaaaggcagcagatcgaaattgtccaccaaaccctccaaccacttctcctctctcctcttcacctcacacaacttggccatcctagcagccagccactccacaaaccgccgagcagtggatacgtcgcgttgcaccggtacacagagcgggaacgtccgccggagcttgtgcgtcaacggctccacccacagatcgctcgacgtggcgtctgttccagcaattactgcagccgtcgggaatgcgtggaactgaggcaacaacactggggcgttgaggtcccgcagccgtcgcccagacggcgactgtgatacagcattggatccattggccaccgccgcctcgtcgcgcgcgcagtacttctcgaagaagcgcagcacttggctgtagctggtgtcgttgttcttgcgcagaagctcctgcacggcgcggcgcgtcttctcgcaggcgaagtggtaggcgagctcttggcacacgctgtacgcctccgtgtcggacttgaactggcgctgtgaggctgcgcgcgagtccgatggaaacgggaatgggtactcaacggaggcgcctcggtgggcggccgagtggcccgcagtcaggcagccatgcgggtactggatcgacacgcccgtggagaaggccgccgcctccattgggctcggataatatgctggcgtcgaagaggtccccgtccaatccaatcggttgaagcgtcactttccaccaatcagcggtcgtcctaacggccgggagcgattctcttcgcctcagtattgcgaagaggcacaaccgccggcagcacaagaccatgagctctacgcgcgtgcagcgcagccaccaggagcgcggagacggcgccgtgccgctgtatccgctgatccggacgtccagagcctcgggcagcgcgcgcacgtcgcggacagggcgcagagccaagcaggagctgcccgacgagcagaagaaggagctgcgcgaggcgttcgagctcttcgacacggacaaagtgggctccatcgactaccacgagctcaaggtgctgatgcgcgcgctgggcttccaggtgaccaagcgcgaggtgctggacctcgtggaggacgtggacgtgcagcgcagcggccacgtggacttcaacgactacatggagatcagtaaggcgcttgagatgaagaagcgccggctgtgggtgctgtagctgacgagtgtgtggctgtgttactcttgcagtgcggcggaaggtgctggcacgagatccggacgaggagattgcgcgggtaggacgcgtgggccgctcgccgcacgaccccaccaactcggacacagacacggacttggagtcggactgactgtgccgcttgcctctaggcgttcgagctgtttgatgaagacggatcaggcaccatcacactgcgggtgtgtgtggcaattgatgttcgtctcgctgttgataaactatgtgaagttgctgaatggagtcgctctcttggcgttgggctcgcgtgtttttgtctcttgagcagaaaatgcgtagggtggcgaaggagctgggtgagaacctcggcgacgacgagctgcaggtgtgtgcaccatgctgcagtagagtaccgtaggtagaccgacgcagcttctctgactattgctgccgcccgcaggctatgatcgacgagttcgatcagaaccaagacggcgagatcgacatggacgagttcttcatgatcatgaagcagtccacagagttctaggcaaccgccaaatggactatcagcgcaagtgtagaatgaataaacgagaagatactgaacgcatcaagcataagaaagaattgtccatgggattatcgagatagcaaaactgtgttcatctcaaaggcaacagcaaaagcgctttgccacaagactagacagtcctcctacagcaacccgcacatagcaacctaggctttcagctgaaagacgcttagttgcggtggtggtggtgctgctcacgggccttaggctgaaaaaagataacaagtcgaggtaaagttagcaaagcgctcaacctctgcatcgtccaatttggagcgacgctgagggagccgatgacatgggggtggcgaccaattgcagtacagcacaggacagcgcaattgcaactatgcgtgtgatagtatccgctacagatctctgctttgcactaacgccagacgcagccaacacgaggtgttgacagccggctgcaatgggtccaccgctccgaccacacgcatggggtcatcatcggctccagcattgtctctctccttccgtacaacaagagctcatcgtacctggggcacgtgcacgccggccagcttgaggtccaggtgggccagcaggtccttggtgtcgttgtcgatctcgatgttctccgtgtcgatggccgagacctccggcacgaagtccatgcggcgctcgcgctcctcctcctgcagcttgagcgagatgccgcgcacctggccgtgctggatgcgcttcatgaggtgcgtgatataaccagcgatcttgttgcgcatgcgcttggacgggatgatggctacctcatcgcacacacgcttgttcgtgtcgaagtccaaggtgaggcgcgagtagtacttctcgatgatcttgacggcagagcccttcacggtcttggtacggacacccatggctgactaggaattctctcttgggcaattgctttcagaaatgacccacacaggaagccccacgcacagcaacagacagaggcgcgcgagccaaccaaccgttggctcggagaattattggatacgagccctgctacagagatcgagcagccaattgttatatgcgagaaatttggacagatgaggtgcaccacatgaaagaggacagggtgtgtaaaaaaaaggtgagatgaaaacgtcactgcgtgggcggggtcgtagctgatcaggttctctgctatatggagcagctccgtgtgtccgagcttaacgtcgatgaacgcaactacactgaccctattcctgtgaggtgccgcgccggactcggcaagcgagcacgcacactggcatgcaatgcacacccatcaatttactcctcggcgtcgtcgaccgtgacgagctcatactcaacggcggagatgttgttgtccgtgttgacactgggcggcggcggcggggtggacgcaatgccatccgggtgcagtgaaagcttgccccactgcgtcacgttgagccgcatgaaaccgttgaagatgtccgcgttgctgttgcgcaccaccaccacgagttcttccttcagcatgtcaatctggtctgcaatccgcaatacagacacaaacgtcagtctccgcacgaccaacacgcagcaacatatcaacagtgtaccattccgcgcagtaaacgtgacgcatccagtctcgtcggccatcaccgcctcggcgatgcgagagatggtgccgtcatagcgcttcttctccaccgtcggcgcgatggaaaccacctgcagcaccaggttgtggccttgcgagcctggcgtcaggtcctgaaccttcacgtctgcattcatagcaaacaacacactgtctgtgagcacaacttcaacgcaacacaatggagcgccacaactagattgagcaggcgtacacgtagcgcgtcggagcttccggggcgcttcgcttgcagcagccattgtatttctgtgcagatagctggtacagtcgtctgcggcgccagcggcgcgagtcttgacctgcagggggcgcggagcggtggtgtaggcggcggagcgacagccaacgtcaatgaacttgtgacatcttggcaaccaacgaggaaagatcggccagcgaccgcgccattgggcaaaactgtgaaccaatcaaacagtgggtcaaccgcatggcacattcgcttcaagctgcacttttgccgagcagcttcaacacccgatggagtggataatgaaaggcaagcaacaacacggcggaagacaatgatggcgtctgtatatgtggggcaccgtgactgcggctggtcgaagcgacagccaataaaaaggaatacaaatggacaaaacccaaccgactagggacgacgacgaggagcggatatgtacacgcgcgcagtaggagtttccagcgcagagtcggcgcgagctggcgtgcggccttcgcctcggcctgcacgtcgaggacgtggccgtgcgctctctatatcgacgcggcctccgcctcgttgtcgctgcagggatgtaccgaagtctctgtagacggatctttctccgcttgctcaaccgagtgctcgtcggtcgtagagggcggcgcagtgccgtcctcagcatcgtgctcttgctgctcgccgtcctctttcatctctgctgcctcgacgccatcctgctcgaatgtcattgtgttcgactcctccacttccgcctcctcctcctcttcaacttcatcctcgtcgtcctccatctcgccgacgccgtacatgaagtcaaagtcgatctcattcgactcgcgtctgtgctggatgatggtattcacctcggcctccaccgaggcgatcacgggctcgtcacagcctgcgttgttcaggatgatctcccgctcttgcgggtccaggtagccctcctccatgtagctctgccgccccactcgcctggaaagcaacaacgaaatgtcagcacgcgatcctaagacgcctatacagcgctgtagactgtatctctatcaatcctgcattgctgcccggcacgtactcgctctctcgctccatctcgtacgagtccagtcgtcggcgcgagcgcgagcgctcgttcagcgacaagcccacgggaacgccgcccgacgtcacgctggtcgtgtagaccgtgggctcgaactccacaatgtccgcgcactcgaaagacacgcgccgccgcttcttgttggggcgctcctgggcctcgtccgagacgccgttggctctgcgctcgacgttctcgtcgtcgttcgcctcctcaggctccacgtcgacgccctccacctcgttcagtctcagatcaatggccgtgctcgtggggctgtcggagtcggagggcgacgcgtccgcggcctcctttgcagccgccacgctcatcagcacgctcttgctgctgctgggcactgctgcaggcgagctggcggggccggagggcggggagagcaccacggtggtcatcgcgggttcgaggcggagcgggggtggatgagctggcggtcgcggagcaccctggacgaaggtctcctctcttcagagcgaagcggctttggtgcagcgaacggttgggataccgagtttgaaataaggaacatcgtggctaggtttagagctaaaatcggtacgctatctagttacaggggctccttacactgagtgtttccggattattcgcaatcaaatcatggtacgcatagattatgaaaggatttaggatcgccctgtcacttgtacatgtttgcaccctctcgcaagtcattgggccaatcagcgacgatctggggcaggctgcaaaacctttcaaaccgactgtccatgccgttgggcagaactcctcttcaagacacggcaagggtgcaacacgccacagttccagccagccagccgcgccgccgccgtgcgggcattgccgggcaaagcgcccgcggtcttcatcaagttcttgcacctcaagcgcggatgtcgcgtaccgcttgtaccgcggggaagacgggcgcggtcatgctgtcgttgttgacagcgcgctgctgcgaggcgagccatgttgttgttgccccaccgcggtctctgcaatcgcctgcgaacgttctcagccagccaagccaccccaccatccccccgacggacccgtaaaggggcgatgggggcatcgctatcggagcccgacggacgcgaaggccacgtcacctcgacacgtccgcgacggacaagtgcatgcgcgccgcgaagcgcggggcgctcggctcgagcgtacgtcggctggttgaagaccatgatcaagcggcctgtttcggcggacaactccgcttcgtctctcttctcttgtctctcgtcgaagggaccgcgcgcgatgccctgatggttggtgcaggcgcgatttgagcgcgtcaaaaggattgcgccgatatgcatgcgccgcagcgactttcggccggccagcgccggctgtcgggcccgagaagtgtacatacgtcgctgccagattcggcgccggttgcggcagtggctctgcttcctgcagcctgcagcagctccgtgcggagccgagtgagctacgcgcgccctgcagcagcaggcggcgccgctgccgctgctgatacacttgacccgaagcaccatgaaaaagagaccgggccgcgcgcgcgcgatgttcaagcaggcaggcatagagaggcctcttgtcagtgcagagccaagtccgccataacagactgcgggtgtgcgatcggcgcgcgttcccgttttgctctgcaaagccccgagacacggccgtcggcacctcgccgatgctgctcgaggatgcccagaccgcttgacaggctggcagcagtcgtgaggcgcccggcggcgcctccgtttcgaggcgaaacgagttgaagcgagctcttcctggttcagttctgctagatggcaggcgtgccactgtgaaccgtatgtaccgtagtggatacgtgcgccacagagacaagccaattaggcacacgaacccccgctatacttggtcggaccacaaaacgctttgcgcaggaaatgtaaatgttatcactaaagtcgcgaaacaaatcgcgcagctgggcgctgatcgatgcgggcggcacgcaccgatgcgattacggcgccggcagcgcgccgtgtacatttactgcagtgcatgtgccacgctgttgcgtgctgccgcgcgagtgcgttggcgaagcgtcgagctcgcagacagctaaaaccctcgacagcaacccaccaagtggatcatctgaataagctcgcgctgtaacgacctggaacattccgggccgcggcgccctcggtcctaaattttctcactccccgccggatgctgctgggacagaccgccttttgaagccggcggcttgacttggggacacatacattaatgaggtgacggacgccctgccgcgtggcggcggcggccccagccgccgcggtgcgagctggatacttcggccgctcgtcactgcgcggcttatttgcgcggtttcggaggagcttgattaccggagccccagcgcaagctgttaccagcgccgccagcgcaccaaccttaggcgtccgtttcgaggcgatcgaaatgtgccgagatctgtcatacagcgcgcaagatgcgtgctccgcgcgcagacgaggcggctcttttctggctggacaggagggttccctgctcgaaaacgcacatacacttgggaggtgtatgctgcccagcgttggcggcgacttcatcgacgcgctctctgctgagcgagctgcaacgagcagatacgtatcattcgccacgtgccgccccgcacagctactggcgctgcccactgcactctcgtcggcgccgccgccgccatctgctcttgggccggcggatcagcagcccaagagctcaagactctttcaggccgtttttgagcgagttttttttgcaccccatacaaactggtcatgccgtactgtaaaacttgagcagggctaggggcgtgagcgagaggggccgctggccccccgttcgcgcaactcgccgcaccctctgcgggcaacccccggaaggacaacgattctccctctggctcgctattctgcaattcgccgcaaagatcgcaagcagcgttggcgcgtgcgtgtgtgtgtgtgatcatcaatccgttgaaccccgcgaatcaggacttgcccagtacatcgtagacccatgtcggagtactcggagatggcgcacaagcagatggccaacgcgcccggcagcgccgtgaacgagagctacaacccggcgtaccagcccgggccgatgcccgtgccgatgctgccgcgcctgcaggtgccgcccttcgcgctcacgccgcagcccacgcccgcctggaagctgccgcaggagcagcccgcgccgcgcatgagcgtgtccaaccttctgtccggcagcttccgcagtcgcaacgcgcagccgccgccgcagcaacaggcgtcgctgctcacgcccccgtcgcccccgcaagcgcccgccccggccccgcgtcgtctgcccagtttcgctgacatcctggcgcgaacgaacctcctgcacctcgtgggcaggtcgagcgagcccactgaggcccccgctcccgccatggaggcgccgatggaggaggtgcagatgcagcagcagcagcaacagccggagcagatgatgacgcccatgtaccaacagcagcagctgccgcagccgccgatgatgatgatgcagcccatggaaggcagctacacggcgtacgcgccgccccgcgtggacacgaacgtgagcatggacacgtcgtccaacatgggcgacgagctgcagagccccatgggcgcggcgtcccccgtgagccagacgagcgagaccaacaagcggcgcgagcgctggacggaggacgagcacgcgcgcttcatggagggcctgaaccgttacggtcgcaagtggaagaagatccagaccttcgtcaagaccaagacggccgtgcaggtgcgcacccacgcgtacggctacttcgccaagctgctgcgcaacatgcccgaggacgacgcgatctgggagctcgcggaggaaatgagctccctgcccggcgcggtgctgaagggtccgggcaacggcaagcgccgcaacgagcccaagacggacgaggccggcatggaagtgctccgccgcttcgtgttctccaagaagaagtcggaggacaagaagcaactgccggcgcccagcgaggcgggtgaggaccgcgagaacgtagagatggccgagtcgacgccctccaacgccaactcgcaggcgcccacgggctcgtggagctccacgcagcggtggaaggccgacgactcggacgcgctgctggagatcaagcgccagcgcctgaattaagtagtatatttttgcggcccccatgagttaattgtaggcaccaggataataggacatcggcagtgtataaaaaaacgatatacactcggcaaacgctatttattggcaacatgagcgaggcggtggtgcgggctgcatgcatgggcacggcgttacggccgtttcctggagccgaaatattggtgcgcggcaccggcacacggtccgcccacggcagcgagctccgttggacagagagattgaatcaggcagagagactctctcagagagcccgcagcgattactcctcgagagacgagggcatcattggttgtggttgaatccctgcgcggcaaagtgtacctacacctttggcggagctcgatgctgaaggatggatgccccacgcgtccaaggcgatacagcggccagcaggcggcgtgcgtgcgtgcgtgcccaggcttcgagcaggccagacgcaggcaagagctcgccagtgcaagcgcttgtctacgtttgttaattgaatctgcaggctcttagaaacggcgcatctttagaatctgtaccgcccgaaatggaagatttagaagctgtaccgccctttctaggccaggaatcaagcgcgcagctgcgcccatttgtggctcacggcgcatcgacaacgcaagagagcgggcgacgaatttcgttcgcgccggcggcgacgtcagtgtttcaggcctacctgacagaccgaccacgattcttgctcctcgacgttgtttgtagattgggtactcgagttgagggattggggccgagattccgtgggggaaggtccgaggagcaactttcacgcggcattgccgaccgcaatcgacagtcgacccccgttgcaagagcacgaagcagatgcacgcattggcgtaagctcctcgtgtctgaagacgttgcccggcaaaaggtatgtatccgtacatggtaggtagtccatcatacagtaatcgccccagtgtcttgcctccaatgccgcaatcttggggttggttctcgcaagcggatgggaaggtcggcttcatagtgcaccatggtggaaccgtcatgatcttcgggcacagcctccagtgtaagaaatctaaagcgctttggacgtgcttcctcttgatcagttccgatatttcgcgactacaaggttgatcgatagttgctgccattttagccatgacaagctgctgcattctggtcaacagctcaacgcagagatctcagttcaggctgagacccccttcctctttgccaagtatttcccttcgcataagtgagtgaagcgtagagagctgagttcgggtctggctgtcacggaagtccctacggtgtcggctagaaattgtactcgcaggacgccttgtcgtcttgcaagaattgtcaccgcgacgactctctcaaaagtgcgtgctcctggccgatggttcgacactcaaagtgtttgcctcgaattactcaggaagtagaaacccgcgtgcattgttggaggcggcattgttggagtgtggtcataatgactaattgacataacgttacaatgaccactggggaagatcaccttcacatatattatgccgctactagcactctacttaaacggccaggccttctcgacctttggcagaaagttccagtcgttcatcggcgtgttcgccttgccaaacttggtgtcgttcagagctctgcgtgcaaagtccgtcatctggttccacataatgaggtcctggaacgcaccaggcttcgtggtggtctccagcgcgtggttaagcggccacgagtgctcgtatttgactttgacgctcgtgccgtcgatgacattggccgggcacggggcgtacttgttgtagccgttgtgccacgacggcgaacagcccaaaatcttgggctcgggcacgtccgggttgtcgatgaacaccacaacgtgctcccagtcgtggcggtggcccattttggacgacggcgcgtccttggggaagtaccacgagtacatgatggcccagacgccgttgatccacgtcgagcgcccgtacacttgcgagccgtgaccggagccacggcaaccgcccctggggctgcccgaagtctgaagaccgccgctggtctcgcccgcatcgttcacagcagggtaagggacgcatcccgtgacgatgtcgatctgcggcttaaacttgaccgcagccttctcggagatcgtcacaggatcaggctgagggaagggcttcacctcgtcgtgaccaattgtcttcgggtgccacggagcaggcggcggcgtcggagcgggggtcggtgcaggagttggcggcagcgtgggtgcctccgtcgggggctcctgacgtggctcgggactcgatgacatggttgtcacgttacgcgtaggcctcgggaatttggaggcgatcgcctccttaaagcccaggttctttgtcgttggctcgggcgtgtttatctcctcttgctcttggttattggaggaatcctgccactgttcttgttgctgctgctggtcctgttgttgctgctgggaggcaccttgagtctggatagtggcgaccgcgagaacgagggtggtgaagaatgcaccaagcttcatgttggctcttcgaactggagagtcgttgtgtgcgcgacttggagaattgaaaagtggagtcaacgagtggacggtagagcggctattaacttaccgaatgcttggcttccagatgcagctcacgattaatcagtggctcaatagtgaagctcatcgcgttctctatcctcacaatgccaatgtggtgtgtaggagcagtgcgagctttccgcatggagaatcttttaacgcatttgacgccaggaacgcagagctctctggcgagctatccagatgcgcttggcaaatgggatggtgcgaagaattctggatagctcgccagagagctctgcgagctatccagatgcgcttggcaaatgggatggtgcgaagaattcggaggacttcacagcaactcacccgtcgaccacttgagtaatttggcggcgtgcacgatcgcagtttaaatgtcggtcgtaagcagcagtgtggcatgcgaaatcgtactcgacacatgcttggagtggcgaggccccatgccaccgcgacgtgaagtgctgtacagtacagtacaactacatcgacatcctggtagtttacagaccgcgacagcatcgagaggtgtttttgctataacttttccggattacatgcaatttgactcaaattttcagagctgctttggattgtgctgtgtataatatgctggaagagctatggatagaccgcgtcttgtgacagagcagcaagggcacatttatcgtcacctacccacacctgtatattatccaatgatatccggctattttgactggataaacttgtaccccgccaaattaggtattgcctacagtatcgttttgtcagataaatcggggttaccgtaacctaaatatgggttgtgtagttcgatgacaactgagccactttaccgctccgaagcaagcacgctggtatcgagatgcctccttccaaaagagcgcgaactgagactcctgacgccgaggcggaaatcatcgcagaagctcaaacttacacaacagatattgccgcttgcaaatactttgccctctaaaataaacctctaaaatagaccacgcctgtctctaaatatgagtggacacgagataggcgagggctgatttagctttatgctttgctgggggccgcttttaggcccagaaactcggtttggcccgtatacaatggcatttctgtgtttccaagtcgtagaaaactgccttggtcaagaaaacagagccccaagctcggatcttagaccgtactggcgagatatacaaatcagacctaggtcttaattaagagctggctggattaaaatcgagattattaacgagataataagcatgagttggccaaaatatctggaaacggcaataaccgcggcagagctctcacgctcctggaacgtattgacgtcctcatcgtcacagccaacttgaagtctggcgctgtcaaattacgtcagaaagagccactcgcagtcaaagttggccgtctgttgtcgcactcagccaacacagtccgtcagatttggaatgactttgccaagtatcggtctctacccgtggcatcggcgccatctaatcgtgagcagaagccgtcccgtatattggcgactgttgatatggagaggtctgtgcgcgagtttattcgtgagcgcagcgcgattcgtgagcgcacggtagccaaggacgtcatacaccacctcatacagcaagagttgttagtcgtcgacgtcaccgacagtgccgctacggcctcagcgctccgcaccgtccaacgcttcgtaaaacgatgtggtttcaagcgggtaaagcggaaagggtcgacatatcggttgtcagctgaaaacgaagctaagcgcgatagctacgtgcagatgatggcatgtgaaagtgccgatcgcgttcgaacggtttatctcgacgaaagttatatacatcacaactactccagtcataatgactctctttatgacccgacggaccccaaagtgataaaggagaaacaaaagggtcgccgattttgcttcatcgctgccattatcgacaaacaccgtaacctcccggatgccgatcatactgaggctgacaaagcacagtttttgccggagacgcttgacatttttgagggaggcaagcaaactaaggattatcacgggatgtttaatcatgactacttcaaaaattggattgaaacgttgctcgtttgtctggaagaccgccaaccgcaccactgccgcattgtgatgaataacgtaaaatatcacaagaagttgccgcccaacaccccccgaaaagggagtcggagatccgacatgcaggctgcttgtaagttgtatggcttgccttacgctgaatctgatacaagggcgatcatgtgggaaaagttgtcacggcacattgctgagcacgtagagccagagattgtgactatggcgaagaagaagggccacaagtagtgttcacgcctccacactactcagatttacagccgattgagtatgtgtgggcaaatgtaaagggagaagttgggcgccagtacaccaaggatactacattccaacaggtcagaagtcggcttgatacagctttcaaaacttggtcgtcgaaaactgttcaaggctgcattgacaaagcaagagcccacttggtggatctgaatgctcagatcaaaagttatgatagccgcagtgaaaacgaggattcggacagctccgagagcgacgaaagcagtgctagtgatgactacactagctaatattttagatatccataagtaagtctagacactgattctaagaaatatgatccgatacatttgtagccctgtatgtcatctttcgatctatcggtagaagagtgaggataacgagcatccgtccagagtatcatttctctacgatcatgactctgcgactaatccgctgccttgtcattggccgagaaaaatcataggggtggtaatgattggcccaaatgcaaggcatatttataatcagcgcacctattaaggggtggttattatataaatcagggaaaattggctgctgtttctgtggaaacgacgccgtgctaaacagtgagacgcacattttcgcaatcagggaagcgagacggtttttgtgataccaaaacatgtaggggttagaaaaaacctctcgatcgtgtcgtggactgttaacagcagcaggtacatgtatatgtagatgcgcgtaggtaacgcaagttccggtccctcaactgtttcggttgaactgtcgacagcacagcagcatgatctgctaatgctacggacacttcaatcaacttgaagcgtgctttctgtggtcgctgtcgacggacacctgcgagcactcactcgacaagttattgccagtggccgtggattcattcgtggcaagatgccaactctcgcaacgctcctgtccgtacccggtagctgttcaaaatatgccatgaaaacttacgtcgcctcagtcaaaaatgactaatctgagtaatggggtataatgaaactgatcaaaagagaaggaatcgtacaagttagcgcgttatgcgtgtacgtccagcgcatttgctgctattatatgtgtgagctatgttgaactgtacagctgccgaaagcaaacgtccggccttggtcggtaggcctggttcagtagttcaagtaagctcggacttgctcggaaacttgccgaagccgtccacgagcatgggcgcgagctagtgtcgggtaatatgaagtgattcgaggcgtcgttgatggtggtgttgaggcggtttcgaacagaatctgtaggagccgttggtgaagaaccccgcgttcgacagcagtccacagcgagttgccccaggccccggaggtcgatcggggtgtgcacatggtcacctttgcgtgcataaagtaataggccctctaccagactgttcaagacgataaattgatgacagcaacgcttgataggtgcttatatcccccagtcggccgtagctgttcggctgaagcttgacattcgccagttgggatcacaattccacgcaactcctaacatagctgtagtggcgaaacgttattttcccatggtacgacactgaacatctacttggtacatcgtgcacttgaacttgacggcaacgcacacacttgaaacagaacaaaaaacaaagcttcggactcctgttgcttcactcggagcggagcatgcggtagcccttctgggtcgtcgcgtcagtgccggcggtgccagaagcgctgacgccggttttaccgccgccgttgccggtcgcagtcgtcgtagccccaccagcgccagtgtcagcggctcctcccacgctggtgctcgcaccggccttcgcgctagcgtcagcatttccggtcgctccaccaccaacgccagcaccaccagcccctcccacactggcaccagcattagcgccgccatttctaccgacgcccggtgtgccgccgacaccggcagtcccacccacaccggcaccggcattggcgccaccgttgccactgacactcgcggttcctccgacaccagtggatccgccgacacctccgccgacaccgacaccaccagctcttccgacgctagcaccagcattagcgccaccattgccgccgacaccagcagttccgctcacgccggcacttgcagtggcgcctgcgtttccgctagcaccggcggttccactcacgccgccaccaacaccggcagatcctccgacaccggcagtgccgccaataccagcgtttcctccaacaccagctccagtgtttgccccggcacttgctccagctccggcagtacctccgactccagcgccaccgtaagcgttgccgaaacctcggccgtacaggccggcgctagcgccgccgtagccgccgctgtaaccatttccgtatagaccggcaccgccagctccgtagagacccacgccaccgtgaagaccggcggccaggagtccgaatgtctgtgcggcctcttgctcggcgtgtgcaccagtcgagagggccacagcggcgaggcacaaggcggcgatcttgctgctgctgaacatgttggtcgagtcgcttgtggttgaagagtcttcgaatgcacaggagctgcttgttgatgtgagctcgagtgagtgagttgggaaatgagtccgaggcagcgcgacgcagcttcggccggaagcccgaagacgtcggggtctcgctcgagacgtgccaagttaacgtggctgggctcagccgatagtcggtgaagatgctactggatacgtcatgtcaagtgcaggtgctgcctgcctcgatcgacccacgcgatgaccagcttccccagcaggtatgccggcacccagcagcatgactgctttaaccgttcgcacaccatgtgagactcgccatccgatacgactgatccaaagtgcgccgcatatggacttgatttgcgccgaaatgggtcgtcctcctgaacggttcgaatgaatgctagcaacgaagccgaacgcctaaaacaacgggtcgtttttgtagccgaccggcgagtcggagaagcttcgtacgccgccgtgtctggttcgggcgtgtccattacgacaaataccttgcaaagctttgccggggatcgcaacttcaacttggccaataccaatatcagtattaaatgtgcaagcccgatgccaacatctccagatgccaaaatgcggtggtaaacaccgcagtcgacagtgctgttgctgccgttgggtgatcgccctggaacggacttctgtcacgagtacaagttctgtttgatcttcacgccttgatacacgagaaaaagtgctcaaaccgtgcgagtccggttccgatagacctgctgcaagttcaatcgcggagcagccgaatagtgagagcatggtttggaagtacgatagatactgatgcctgtgcatcgatacataattttatcgagcgcacttatatcaacgacagtaacttaatactagttacattggtatccatcgacttgtagacctcttcgatgcaagaatgtatgccgcgcgggatacagcaacgtcagtcgtagtctgggatccaattcagcaaaaggcgaacagttctactacatgtaccaatcgttcgtccaagttttacatgatcgcgcgcgccaagctatttgaccgcaatctactctttccatgctaacttaaaacaccaattgagtgcgcgattttgggtcatttcggaatttgcctacgacagcacaaggatggttgagtagaagctattcgggtcatggcgtattacagaataaggaacaataccaggagcatattcctaactgtaagataaaccgtccttgcaaagctataggtggaagtgtagcggcacaaggagcaataaaagccagtgatcattttagtgcacgatccataattaatcttggtttcagtatgggcatgtacttgttgatagcacaggtgcctgttaagacatgtatgtctttcttgccgctttgtgattgtgataaagcacactgacaccctccaaagtcattgttgaatacttaccgcaaaacttttagaggcccttgtcggaagctgctccatactacatgtaaaactgtcgcgcacaaatttgattatcggcttttaggccaatccaaacatcacaatgtctaatagatcgattacattggctaataatgcatatcgtgcaataaattgaaaccgtgcactcaattggtgttaagttaactataatagctcgagccggtgatgctgttcgagtcggtacactgatgccaccacgtcagtgtcttgatggataccactctgctgtccgagcaccctgcaagcatgcgcatcaatccagttttccaactcgcgcttctactactcgaccgctccacaatgtgggctgcaagcagcaggtttttcggattcagagtcacttgcattgggggcacttacctttgtgccatcatgtacagatccaacatacactagtactcgtgacagaagtccgttccagggcgatcacccaacggcagcaacagcactgtcgactgcggtgtttaccaccgcattttggcatctggagatgttggcatcgggcttgcacatttaatactgatattggtattggccaagttgaagttgcgatccccggcaaagctttgcaaggtatttgtcgtaatggacacgcccgaaccagacacggcggcgtacgaagcttctccgactcgccggtcggctacaaaaacgacccgttgttttaggcgttcggcttcgttgctagcattcattcgaaccgttcaggaggacgacccatttcggcgcaaatcaagtccatatgcggcgcactttggatcagtcgtatcggatggcgagtctcacatggtgtgcgaacggttaaagcagtcatgctgctgggtgccggcatacctgctggggaagctggtcatcgcgtgggtcgatcgaggcaggcagcacctgcacttgacatgacgtatccagtagcatcttcaccgactatcggctgagcccagccacgttaacttggcacgtctcgagcgagaccccgacgtcttcgggcttccggccgaagctgcgtcgcgctgcctcggactcatttcccaactcactcactcgagctcacatcaacaagcagctcctgtgcattcgaagactcttcaaccacaagcgactcgaccaacatgttcagcagcagcaagatcgccgccttgtgcctcgccgctgtggccctctcgactggtgcacacgccgagcaagaggccgcacagacattcggactcctggccgccggtcttcacggtggcgtgggtctctacggagctggcggtgccggtctatacggaaatggttacagcggcggctacggcggcgctagcgccggcctgtacggccgaggtttcggcaacgcttacggtggcgctggagtcggaggtactgccggagctggagcaagtgccggggcaaacactggagctggtgttggaggaaacgctggtattggcggcactgccggtgtcggaggatctgccggtgttggtggcggcgtgagtggaaccgccggtgctagcggaaacgcaggcgccactgcaagtgccggcgtgagcggaactgctggtgtcggcggcaatggtggcgctaatgctggtgctagcgtcggaagagctggtggtgtcggtgtcggcggaggtgtcggcggatccactggtgtcggaggaaccgcgagtgtcagtggcaacggtggcgccaatgccggtgccggtgtgggtgggactgccggtgtcggcggcacaccgggcgtcggtggaaatggcggcgctaatgctggtgccagtgtgggaggggctggtggtgctggcgttggtggtggagcgaccggaaatgctgacgctagcgcgaaggccggtgcgagcaccagcgtgggaggagccgctgacactggcgctggtggggctacgacgactgcgaccggcaacggcggcggtaaaaccggcgtcagcgcttctggcaccgccggcactgacgcgacgacccagaagggctaccgcatgctccgctccgagtgaagcaacaggagtccgaagctttgttttttgttctgtttcaagtgtgtgcgttgccgtcaagttcaagtgcacgatgtaccaagtagatgttcagtgtcgtaccatgggaaaatatttttttctgctcttacagcgatgttagtagaattctgcgtggaattgtgataccaatagtggggaatgtcaaggtccaggcgaacgactaacaaccgaccggaggatattagcaccgattgtgcgtagctgtcaccaacatctcgtcttgaacggccttgttacttcttccacgcgggggtggtcatgtgtgcaccacggcctcgaccgccagggcccggggccacttgctgcggaccagcgttgttagcaccgaacgacaactgcatgggttcatcagaagcgaagccaaatccagcagggactccagcagcatttggtggcgagttaatgccataattctctccgtagaactcgttgaccagcgcagcggcccacttggacaagtgctcttctccacattcaaactgtacggtctccagcgcgtcgatgccctcattcacctcaaccagcgaaactccgcgaggggccacacgcaacacgttctcgatgagccgcagcgagttgccgacgatagccacgtctgccacagtcaggaggtgcaagaaacccttgaggacgtccagcgctagcaccttctccatgtgcgccgcactagtaagcgcgatattagtcagtgcgaacgccacttcgcgtcgcacctcgtagcttccgtccttgaactgctggcccagaagcgggagcaactgtgcctgcatgagcagctccacaactggagcctcggtcgcagccaggttcgagatcacccacgctgcctcagcagccagagatttttgctgcgctccagccgcagcgggctgaaggaacttgtgcaacttcggcaacacgaccgagtctgcgctgagcaagcgtcgaacgtacggcatctgccattcgtccgtgtggtggtccggtgagccgcagcaaatgttgccaaacacacgcaggattggggtcagcagcagctcgttgttcgtggagaagtagggcaacagcagatccacgagtccgttctccagcatgagcttcaggtactcctcctcgcgtgcggtcaagaagctcagcagccaggccacttcgaccacgatatcctcggagaaagtagcaggcgagctgggctgagacagtccgctgaccaccaccggaatgataccggcgtcgacgaacggcttggccggcgtctcgaaccctcgagccaggttggacagcgcccaagcgctggtcttggccagctccttctcgcttgggttgctcagcagcttgaccagcggcaccaccgctccgttggcgatgagttgctggcggaactcctcgcagtccgctgcaatgttgcccagcacccaggcggcgtgttccgccagcgagtggttggatccctccaggaattgcagcaggcggggtacagccggcagcaccaacttcgtgtgctcgtactggccgcttgcaatgtttgtaaggcaccacaaaatctcgcggtacacttctccgcccgtgcgggtggcactggccagcggcgaggccgagttgagcagcgataccataacaggcacaatctgccacaaataagaaacgcaaagacaccacaaataagcacacaatcccaactgcgtcccgactcaattgccccgttgacacagtattccgtcagccggacacttcaattggacactacagcccggacacgcaccccggactcgatgatctgctccacggcctcgtagtcgttctcgtgcgtggccagcagcacgcggatctccttgagcgtctcgaagcgcgcctggctctgggccgccgatgcgttggtcgtgtccccgaggatcttgaccagctcggcgatgctgcggcccgtgagcggcggctggtcggccgacatgaggcggcgccgcttggtctgcacggcggcgcggcgcttgtccttgcgcacctgcgtggtggtgcgctggcgccgcgccttgagcgccctcgactcggcggccgcatcgtgcttcttgagcgagctgcgaggtgttcggggcgccatcttcgtcttgcttggatcggcaaaaataagtgggcaaaatggtccacccctcgcttattcgtgatagttttggcacgaccaaaaactgggaaaatagaccggactaaaaaaactcaacgctgtagagctgctaatagggctctaagctgtcgagtgaagacggttgagtgatattaaacgtgtttgtaggcggtatcctaagtgcattagttgttggcgtcgttgttgtccagctcggcgcccgggttcgggttctggatcacgatcagcgcgtactccttgtctgcagcagcagcaataacaacaacaacagcggcaacaggcgcagcagaaagttagatctggcagcacagactatcccaggataacattgcagcggcggcacctggtgcgatcatgatctcgtgcttcttggagcggatgcgcaggaaagtcatgtcgttggtcgggtccagcgtgcggatcgtggacttggccttggccgccagctgcgagatcagcgcggcgtggtccatggcgaactcctcgtcgctcgtgctcgagtagatgggcacgccctcctggttcacgatgagcacggcctgcacgcccttgtggctcttgatgcgcttgatggtctcctcggcctcgtatcctggctgtcgacaggcgaggagcgatgtccacacacacagagacagcagcaacattagaaggagatgaaggaggtcggtatgcaggcagagacgcaggcgcaagagcggcagcgctgaccatggtggcgacgtccttcgggagctcttgatgaatatccgccgctttgctggtaggtcgctccaatggaaatgttgcaccaatggagtataaatgttgcaccaatagaatgtcgtggcaactgtggtccacatcgtaacgtaggagtagtagattacggtgtggcattccgaaagaagttgttccatacaggacttgcgcacggcgctttgctcctctgcatgacgaaacatcgggaagaacggaggacgccatttcaacgatgtgcgtgtcacttcggcatgatccatggtgggctaaaaattaaaagcacaagagtattaaagccttcaatactgttgtcgagcacgcatcgccgagcgtttccttccgtcgtcaaaactagcgatcactaacgggcgcggtcgggacgtgatcgacaaatggtttcgacgacggatgggcacattgcctctcatctgtccacgtggattaatcgcgctggactaactttaccatgcctagccaacgaaaagaacatcgcgatttggctttgttccttgcgtcgggcacagcaagcatttcgtgtcaggcgctggttccgtgactttgaccacgagcgacaagtacaaatgacgcggaggaagcaatcgagggagtgcaccgtgaacgattcaacactgtccaccctacggtcctacttaccctgtgcgcgatattcaacttgatacagcagagaaaatctctgtgagcgccgccggagtgtcgtcgagtcgacgacgtcgacgccctccctgccgtgcataatttacagctggcttaccttaactcttaagatgcgatcaccggatcgagattctaaaaacctgtacatagagactgaacgacttggcgacattatgctcaacaaaagtcgttgttcacacgatgtgctatcccattcaaggctttccgacaaaaagcatcatcgactgtactatagaaccctgccaagttgcacgtacacaatacgacggatccttgtgcaacatgcgaaaacaaggcacacactgccggtaacgtacaaaagtcttcctatgatcgcggctgggattggctcgcccgcgtactgcacatgtgtgcatcgccccagtggataacggtcgagtccggatcacgcgctttgcgaagctcgtgccagtctgttgccgtttgagaaactctctctcacttgtcgatttttcaagccagacgcggagaagaaccccgacagagtctctcgccgcatgaagttcttcgtcttcctgactgcagcgctccttgctgcagcccaagctcaaaatgtgctccaaagccaagacgcgtcccaaacgcaggagatcgtccagcagcaagagcaagaggtcgttcatcagcaagatgcctcccaacagcaagagcaagaggagatcaacacgcccaagccgactgtgaagtacctggacattaaggaggcgctagctactaagtacccgagggctacgcccaatgtgaccatcaagccaacgagacgaaacccacgtgaaacggagcccccgaccccagcacccacgcttccaccaacccctgcaccgactccggctccgaccccgccaccagctccgtgggtgacgaagaccatcaaccacgacgcagtgaagccgttcccgcagccggagcccgtcacgatctcggaaaaggccgcgatcaagttcaaaccgcagatccgaattgccacagggtgcgtcccataccccgctgtgaacgatgtgggcgagaccagcggcggtcttcagacttccggcagccccaagggcggatgcagaggctccggccacggctcgcaggtctacggacgcgcgggctggttcaatgacgtctgggccatcatgtactcgtggtacttccccaaggactcgccgtcgtcgagaatgggccaccgtcacgactgggagcacgtcgtcgtgtggatcaacaacccggacgtcccggagcccaagattctcggtatttcggcgtcggctcacagcggctacaagaagtactcgtctcctcctcctgagaacctggacggcaacagtgtcaaggtcaactacgaacacgcttggcccatcaaccacgcgctggacaccaccgacaaggccggcacgttccaggacctcatcatgtgggagcagatgacggaagacgcccgcagggctctgaacgcagtgcactttggcaaggccaacacgcccatgaacgacggcaacttccgtcacaagctcgagagggcttggccattctaagcgccgtaggtagagatcagacgtgtgcgtttgccgattaatcggtgcagtgcgctagacgattccaaaacattcggttgctgtaaatacgtgacttccgtcaacaactacatagtggcaaaacacccaagactagcaaaatgatacgccaagacaagaagcttaaggtgccgactcctgctcttgcaaacaacccgcagacctgctgcgtggacacgagcgagtggcccaccttcccagtcttcactgccgcgcggctcgtatgtcgcgaacgtctccacgtgattggggacaacagcgtgctgcgagagatcgattccttccaggacgagctctccgagtcgttgacactgactgccgcctacaagatgtcggacggcagtctgcgtcttctccagtacctggctgaccataagtccaagacgaaggattggtttctccgccggtgggacgtcaacgccgtgacgggccaagcagcggcacgcggggacatgagaaccttgaaatgggtcgcagagagctatttacccggagagttcctcatcttgaagtgggtttgggagaactaccgcagcagttgctactggggaggggtagagttggccggggctatccgcaaccagcaccaagacgtcgtggactggttacgagccaatgttacgcttcgacctgagtgcgccgagtacttgatcaagcctgcagcagagtgcggcaacttggggatcgtgcagtggctccttgagaactacgagttccaaagtgtggacgctctgaatgctgcagcgttgaaaggccagtgggaagtcacgcgatggtttctggacaatctttcgcgtgaggacctggatgctgccgtccagtcaggatacatttatctatgcccagcagagtatggcgatctggacatgctcaagtttgttttcggtcgcgtattagtgcaagaacctgtcgaagttctggaggtggctgctgagcatggccacttgaacatcatcaagtggctcgtcgagcagaacggggttgaggacgcaggtggcacattccagcgagctgcggacaagggacacctcaacgtgctcatgtatctgcacgaaaaagtgccagatcattgcagtgactcacttttggacggcgctgcccacgcagggaacctggaagttgtgcagtggctccacgagaacactcgcgcctgctgcaccttgtacgccatggatggagctgctgccaacgggcatcttgaaatggtgcaatggctccacactcaccactcggaaggctgcacgtcgttagcaatggactgggcagccgtaaacggtcatctagaagtggtaaagtggcttcacgaaaaccaacaggaaggttgccggccggacacgatgacaagttgcgctagacgcggtcacctggacatggtcaagtggttgcacgctaatatacatcaagatttcgaccacgatggagccatggacgcggctgctgcccgtggtcacctggatgtggtggagtggtttcacgacaaccgcgacgaaggctgtatttcatttcatttcaaggttgaggttagattgagttcatttatcctaactaagataacgaccgacgcatccaccgtcaacaccgagctcatatctcccgatgccccgccgaatagttgaaacggtctactcgacttccgtcgatttggtaccgcggacagcgaacgcggtcccgctgctccttcagcagcgcctgccctccgaagcttgagttctccactgcattttcctgggccgacttgcgttccttcttcccaatgtgttgcaggccaccagcgagcgccccagcagcgctttatgcggcgacgtgtcgtcaccttccccgagtcagccgtatctgggtctctgccactgcgattttcttcgccccgccgcgccatgagtgcaccatgagtggacaccccgtcgcagccagctccatgtagcgcaggccacgttgactgacagcatgctcccgcgcgtcactacgagtgctgtggagggtgtgcgcacgttggagtgccgcacacccgacgatctggtgacctgccagtatcgcacgcaacctttgttggctatgactaccaggagggcccacggcgtcacccgtggcctggtttgtaatgggaaacggcgcgatgggctacatgtagaccaccgtggaccccccccccacaggtcccgccttccggctgacggtcaaaagaccgccgcaatacgccgccgcaatacgccgccgcacgcagcgacgcagacattcacagccggtccacggtgtcatccgtgagctgccgcgacgaaggctgtactactgaagccatggacggagcggagcggccgggaatgggcatctggaggtggtgaagtggctgcacgaacaccgtcgagaaggatgcactgctcatgcaatggacgctgcagctacaaacgggcacttggaagtggtaaaatggctgcattccaaccgagatgagggctgcactacgactgcaatggatggcgcagcttcgaataaccatctgaaggtggtcaagtggctgagcaagaatcgctccgagcggtgctcgccgttggcacttgagtggctttccagcaagtcgaacggctcgacacggcggttttcatgttctcagaatttccggaatgccgggcgttccgtcaaggagcgaagtttcaagccgcgtggcagttttagagtggctggtggcacgagctcctactgcgctggtgggctgtatgctcgaaatgaagacgtggaactggcacgtctgcgactggcttcggcaaaataactgggagctggtaagtcgagacaaggttttctcgcggtatgtcattgctggtgaataaggggggggagggatctactggagctctgtgttctatacatgagggagaaacgagaacctgatcctttccagcttctggggttacttacactaacttaaaatattcttaggagtcgagctggataggatctgtgaattgaacaaagtatgacgagctatctctgaacggttgctttggatcagtattttgcacgcgcaaactcgtgttatgtatgtcacctcatcaaacttcggctccatttcagtgtatgctctgttaaactcaatcacaactgatccactgaggacttcctgcgaaagaatattcagaaagcatcgctaattcaggtcgaagttttcgagcagatccctagatttccgctctctgctgcggggttttaagagatattgggcacattcaggtcaaagcgcaacactttctcataaccagtccgctatgctctgatggtggttgcggatggccccagcctcctccccagtagcaaatactgtgataattctcccacaaccacttcgagaggtgcaactggccgttagatgcagcttcagcgacaacttccgtggtaggatgtggccaactcggtggtagcttctgcacagacaagagccgtcactcctgctcctgccaagttcaaagcttcaagggtggaaaggaaaagcttatgggggatgacgacgtcttcaatttttttttatcttcgtgaaacattgcccaagaaaaaaaatctcttagagaaaagtagcctgtatggtataatacccaatctattttaaccaaggcttgtccatgtcatcccctacttgtgaagtctaccaatgaaagtgccgggttacgatatttttatccaatgattggtcttacagaaattgtccagcattccaaccgatccgaccatatttgcttggaatttttacagaatatttcttatgctatacaaattctcatataaacacatattctaaaaatatcgtgaagtttccaacccaggcagctgtatccaacagcgcaaaagcgatgtcgatcgcttcccttgctccagctaacagcaagaagtcaagaacgacggctctcaactccttcaacgcgttcctcgaatgtgagaacgtaacaaccgacgccgctcataagcttattggcgccgacaagaccggtaaggtgctgaaaatcatgttagataagtatgcatactccctagctagatcgacagacaaagtgttatcaacaaatacgtgtcttgcgtatttcggaaacgtgaaaaactggttgctggataagtatccacaacagggagcaatcgtgaaaccacagctgcaaaaaatcctgtctgggcttggaaagtattgcagcaaccgcgaggacggtgcgctggaaaagatggccacaccgtgttccaaacaagatctagaaaatatagttcgactgctgtaaacgtcggattcggcggataccatctcgcctcgacgctgccgttgtcgtcacgatgtggtacctgtacaggcgtagctctgatgccgagcagctagagaaacatcagctctcaattcttcctggtaagtcttgaaagaataattattgccattgttttatgtttctatgataaaaactatgcattattaggtggcgtactcttccattgcttcaagagagttaaaacggcttttctccaaggaatttcgctgttcaaagacccgaaaaactttttaacatgccctttattcgctatagctgcagcacttttaatgcagaaggctccgtgcaagcgcatgttcccgcagttcgtggatacgaaacggagtgccgctaacgtggaggacgttgaagagctcagcctggtggagctccttgaggctaatgatgacccgacagcactggtcgaagccgagcaggtgtcggggaagcctaaagtccctggtgcgcaagcctatgtgaaccggttgttagtcagagtcaaagatattgccgcagcaacggacgttcgacttaccccagaacttacctctcactcgtttcggcgcggtgcggccatgcacgccaacgacggaagcctggccgagaactggattatcgagcggggaggctggcaacttgaccgtgtcaacaaagcctttgggtacatgctgggtaccacgcaagccgaccaaaacgttgcccgcgttctgagcggatggaagccgaaggaaggtgcccgccttccttcgctgtgtgcactcgacgaccccatccgtgagcgcgcaggtaaactgcaggccctagtcttctcgagcacgctggggtttaacgacacagcactcaatcttgatgacggtgtagctgatgtcttgatagcgacactcgtgatgcactaccccgacatgctgatcctgtccgaccagagcgacttcattctccggatgcgagaagccatggaagctcgggccataggagagtcggaggtgctggcttggagcgaaacaatccggcgtgccttcaccccgccgccccccaaggttgagccgcatgccaatgacgcccagtccgcagctgtagtagcgctgttaaagcgccagtcggagcagatcgatgtcctcattctgcaaaacaaacggcttgatgaacgactgttagcagtggaggagcagcttcgagcacagtcagacgtagcagcaccaaacgcgcttgaaggagcttcaagctgagccctgtcaccgtgcagccaccggccaccaagtccgtgcgcccgaagaagaaaggttcgcagtcgttgtcggcactctggtatgagtggttcactgccgagcctcgtgtatacgcatcacgctctgtcaaaaagacaacacagcacgagtttagacacgccgtaggatacatgatgctgttcttaccgaatggtttcgcactagacgtagccgcctctgcgttcaagaacgaggtgctcaacatggggcagcaagcgcaagcgaacgctctcgccttcttgaaagcaaacggatctccggctctcgctgccggcaccgcgttgaaggctctgcgcaagctacacaagaccggcaaactcgatgccctgatcactgacttccacgaacgcgtcaccaatggtgccaccgttgatccaccccctgccgccgcacttccaactgtggtgtagtaccccgcggaagaagtgggtgcgccgggcgccggaggaagaaggcgccgggacgcgagtgatggacttcgacacggctgatggaacgcgacgcggattgatgggcgcgacgcagggccaagctcgacgggaaagtcggcgtgggtgatgggccgtgagacacggtgccagaatccagtgcgacgcgtaatcatccgacgggtcgaccagcgcacccggttctgcaaaacgcgccgaccctaaaccccgccgagcaaaacgcgccgagcaagacgcgccgagcaaaacgcgccgaggtaagatcttgattgcgccacgcaaaccgcggcagtgcaagcacgaccgaagtagggataggcccagagcggtaggcttagtaagcagtagtacagtgtagccagtagcaaggacataggatagggtaaggactcagtcccgaaatttctctgaaccacaaagacctccggatctcctcggttccaggggaactaccaagcgtcggcaagcagagccgcctcgatatcgcggccccccgtcgcccgctggttcgggtgctcaccccctcaaccccgtgctggaacaaaggcacgttaaacgtataccgttttggtgggcgcccgataacgcgctgcctaggcgaaggacgcactggcctgataaccgccgtgcacaagaccccgtgtaggcccgataacgccacacaagccccagaaaacgccggcctgatagcgccgcacgcccgacgggaacgccaaggaaacgccggcccgataacgccgcacgcccaaggctcgacgccctacgacaaggaacaagcgtcaacacaagaacccccaactccgaagcctgcaaagacttgggcctgtatttcgaagatacgctactccaacaaccgggaataatttgctcggcgcgaccgctatccagacgcgccgagtttgtgcgagatcgcattcgcgagatttctgcgagggcgctactccacacaaccttcattcgactacaaccaaacctgtaaaccatacatcatgatgcacaacaatataaaacacaattaagtaaagacgatgaccggattcgaaccggtctgcagcgaatgctgctcctccaccaagaggcaccgtcgcgggtaagtacatatgcaccgcagctacgccagcaaatagaagcagggcagttgaaaccaggtagaagagaaactggtagcatgtacgtacactgacagcagctgctcacaacgccgtcggccactctcaacataccactgctggcctcgagcgccatcacctcacccgaggtcacgctgctgtccacgcatccaccaccccgcacgaccttctgcacctccacctccccgcgcggcaccacccccgagctgctgctactgctggcctcgagcgccatcacctcgcccgagtccatgcagctgtcctccttgccgccgacgcccgtcttgctcttggtcctgctggcccgggggtcctctccacgcccgagcactcgtccgtattgccgctgcccgctgctgtgtccgactccgaagctgaatgaatgaatgaaggggattcagttgagatgtcattataatgaaatagatgtcactaaaatgttttgcttcagtaccggtactggttggactccttggtcggacagttggaattttaacggtatgggacgggatacacgttttttattcaagattctgttcgagaagcactagcagtcaattggccggccatggtggacgcaagcgagtagcccgcattcccagttttcactgccgcgcgtctagtgtgtcgggaatgccttcaactagacgtcgacgacagcgtcctccgtgtggtcgattcctttctggatgaactctcggagtcgtttagcaggaatcggctgaccccgatggctacattgcgagttgatgaatgctgcgaggttcactcatgctggagccaggtcggacgcgaggcaagaagatctgcgcgccgatagctgggacgcgacagaccaaaggggttttttactgttgaagttgctgtagtgcatgtccgacagctttccctcctcgtgtacaacacgttgcatgtgggagtatgcggtaggagaaagagaacaatgaaagcattctggttttggttcctgttgagctaagtgacgcgagatattcgtttggtgttcgtctgcaaggccacctacgcagcaggatccagcctgcgctctgctagagacctgtctgctaggctatgagcccaaagaaggcttctggacggaactaaaatgagcagtgatccaaatcaagtcgtgtcgagtcaaggaattcagaacgtgagcccgagtggacaaggctcgagatcgaacacgccggggcagccgacgatggtacaagcggcatcggggccgtctggagggcagccttcagtggcttcgggagctgttggccagcctgcgacggtggtgggtgcagtgccccaggggcaacgtggtggacagctacctgctaatcctgtgattcaagtgcccaaaccacttggcagcagcaagccacccaagttcaacgataccttagaagtctatcagatgcggctcaagttgtacttggagcagagggattcgtggggagtggtgactggtgaggaacgccgtcatgagacggacccactgttgcagcgtcattttgatgaccgcatcgactagccatggagacaatcatacgtggtgtgaagggtgcagatgcgcagaaagtgtgcaacttcgacacagcgaaggagatgtgggagacgctgaccgctgagaagacgcagcgagatttctcgtatgcggtgcacctcaagcgcgagctgtacacgcattcctacacaccggggaagaagatggcggactacattcaagagatgaactcgcttcgtcagcgactgcagcacatggggcctggctttgagatccatgataatgagatgtctcagctgctgctgatgggagtttgtgcggtgcatcgggaacttgtgactcagtttgacttctcttaccggcaaggtctgtgtttaaccttgcaacaagtgaagaacgcgttgctttctcgtgatgaaatggagaagatggctacagactcagctgcaaatagtggagcaccgagttgtggcagctcggtagtgatgcaagtgggccagacttcaaccggcaatcgagccaaggcccacctcctggacctggaccagggccgtatggacctgtgcagaccactggagctggcaatcgtcgtgccattcgctgctatcacagccgcaagctgggtcatatgcggaaggattgctggcactacaaaaacaagcagtcaaaggcccagcaagtgaagagcaacacgcatggtaaggagaagaagaaaaagaaggacaagggcggaaacggagacggtggtggacccaagcagagtagtgcaccgactactggtgcaatgggctacatgcggtttgtggctagagtagaccgggacgagcagagcagtagcagcagtagttcggagagtgaatctttcgtcggcatggcgatgaaggaaggtcggctcggtacgagtggtgactggatgctggactcgggcaccacgtcgcatgtttgcattgagcgcgagctgttcacgcgattgaagaagtccaaggcaacattcaaggtgtgggatggtggcattacacacggaagtttgtgcgggtctgtggtggttactgctgtggacgtgctgagccagagcgagttgacactaatgctcgataacgtggagttttccccttcactggtccagtgaatttgctcagtcttggtctcttgctgaaatcaagttgggtgttgaccactagtcctccgaatgagctgccttgcaaaatgtttttgacgcgtgatggtaaatgtttggagttcatctttcatggagaacactactggttgaacaatgggacttttggcgagaacaatgcggtggtgatatcgaacgtgaacgccgatgcgagtccgttgatgcgttggcacgagcttctggcccatctcaacgaggcatcactgaagtacatggcgaagcatgatgtggtcaagggaatggacatcccttcggatcaactgagaatgaagctgaaatgcttgagctgcatgtcggccaagaggcgaagaatgacgttcggtgaccatacggataagcgcactacggtgagcttcgagcgtatgacgtcggatgtgtgtgacatgggcagatatttgccgggtgtcgggacgatgcgctacttccagttgattcacgacgagggctcacgctacgtgtggtgctatgccctgcggcacaagcgtgaagctgctggcaacacactgcggctgatcgggggggggggatagttgctgatggcaaacgaatcgcccggttcacgagcgacggagggggagagtatatgagtaatgaactggccgcgttcttgaacaagcactgtatcgagttcatccccactcacccgtatactccacaagaaaactgtctcgtcgagaagatgaatggagttctcgtgaacaagatgcgcgctgtgatgcatagtgccaatttgccgaatgtgttctggactgaagtcctgccgtacgtggtggaggtggacaacttgtcgccgacaaaagcactgaagggaatgacgcccacggagaagttgactgggctgaaacctgacatcagcaaattgaaagtttgtggctgtgtgggttaggtgtttataccaaaggaaaaacgaaagaacaagctgtcggcgaaagctggacctgcgttgttgctcgggcttccaaagctactgacacgtcttcaacgttcggcgcttgacgcagactctggaacctattaggtcccaacgccttcgtgaagatatcggcaacattgtccccactagggacatactgcacctcgatcttgccgctctccacgaactcggcgatttgacgactcttcttcgcgaatcgcttcatcttcttgtagttaccaggctccgagaccaccttgatagtgctttggttatccatataaagcgtagagcacggcagagcttgaccgtaaatttctttcatcaacttccgtgcccagatcaagtcctcaacacacatgcttgcagctaaaagctcggaaccgcatgtggcagtggtcaccttgtcctgctgtttactcttgaacaggaatggatacccgtttaatcgcagtagatagccagtaactgaccgactcgtatccggacaattagcgtggtcagcttcgcaaaatgcatcgatctgcagtggtagaacttcacttcctttccggtgcaccaagccatacgtccatgtaccacgaaggtaacgcaaaattcgctttgcgcaaatgtagttctccttggtgtatgtgctgctgtactttgagagactccgcactgcattggccaagtcagaccgtgtgcaacccaccagataatgcaatgctcccaccaattctcggaacgggatgttcggatcgttaatcttactctcgtccgtctccacgggaggtaactgctcattctgcatcaacggcgaacccactggatgcgcatcactcatgccaaagcgctccagtacccgatcaatgtaggccgtctgggaaatacacaacactttaccaggaatatagttcacttccatggaaaggatgtgcttaactctacccagattcttgagcgcgaacttgccactcaactcctcaattacttcctcgatgtcctccgtcttgccggcgatcagcaagtcatcaacgtacactgtcaggtacaccacgcgtccgtccttccatctctggtacaaacccacatcaaagtcacactgcgtgaagccaatctccagtaaaacctcatgcagcgtttgataccagagcctggacgcttgtttcaggccgtacagtccttttaggagctcacacactcgatccgtgccatcgtggaagtagtctggccgctccatgaatattttaacgccacgcagcactccattcaagaatgccgtaatgaagtctgcgtggtaacagtccagatcctgcagaaatgccagaatgagcaggagccgcactgtctcaattcgcaccactggagagtatgtctccatgtaatcgacaccatactttgtccacagcctctcacagccaatcgagccttaagccgatccacttttcctctttcgttgagcttcggtctcaccacccatgtggacttcagtatattgcacggttgctttggcctctcaaccagtctccaggtgccgttcaatttgtgcgcatccatcgccaattgcatagcttgccaccatttgtcacgcatcggagagttcaacgcgtcttcaacggaagtcggattgcctgcacagtattcgagcgcctcaaatgcagccataaagtagtcaaataggcgtacattggcttgccgcttacgttgcgatcgtcgcaaaccgcgctgtctcttagagctgtgtcgtggctgacttgctgcatgaggtcgtgcctctttgtgcctctcactccacggtctaagatcatcggcagtcggcatcggactcacgtaggctttatcctcttctgactcattgccttccgtgtcttcagctccaaccgaatcactgccaccggcttgggatgcatgcgcttctcccaccgaatctgcaacgtcagcttggggctcttgctactcagcaggatgcgactcatgcgcatgctcttctcccaccgaagcatcaacgttcgcagtacgcgctggcagctctgcaatatccgaatgcccatgttgcacgtggtctccacttgccacttcattggccgcccgacgcaccaaatcaccagccttgacacgtactgattgctctgcaacatactccacaggcagcggaataaacggaatttgtggataatagtgttgccttcccttaagcagcgcgttgatatacgtgcgctcgaccgtcacgtcctcgcggaacttgacgtcgcgggactccaccatcttctcagctcgtagatgcaacagtcggtagccatgcttagtcttcaatcccggtccagcaatgagtgaggcgggagtagcaggaatcggctgaccccgatggctacattgcgagttgatgaatgctgcgaggttcactcatgctggagccaggtcggacgcgaggcaagaagatctgcgcgccgatagctgggacgcgacagaccaaagggtttttttactgttgaagttgctgtagtgcatgtccgacagctttccctcctcgtgtacgacacgttgcatgtgggagtatgcggtaggagaaagagaacaatgaaagcattctggttttggttcctgttgagctaagtgacgcgagatactcgtttggtgttcgtctgcaaggccacctacgcagcaggatccagcctgcgctctgctagagacctgtctgctatcgttaacgttaacctctgcgtacaagatatcggacggtagtctgcgtctacttcagtacctgaccacccatgaatccaaggcgaagggcgcttttcttcagcggtggcacggcaacaacgcagcaggccaagcagcagcacgtggagatttggaaaccttaaaatgggtcgctgagtgctatttacctggagaagtcctcacagatgtcgtcactgcagctgcaaccaacggctacttgcacattttgcagtggctgtggggaacccaccgaaggcgaggctgctgggggggggggggggagttgagcttgctggagccattcgaaatcgccaccaggacgtagtggactggctacgagaaaatgttgcgcttcgaaacgagtctgcccaatacttgatattccctgcgacggtgactgggaacttggggatcgtgcagtggttctgtgagaattttcagctggaggttgggggcgcaattactacaacggcgttgcaagccagtgggaagtagagtgatggtttctagagaatgtttcacgcgaagacctggttggggccctagggtctacttgagtccagcagaggtggacaacctggcgatgcttaagtttctcttcggccgagggctagtacttgaaccggtaaaagttgtggaggtggcagctgaacatggccatttggacgttgtaaagtggcccctcgaagagaaaatgattgatgagattggcgacgcattccagcgagctgcgaacgggggccatctggacgtgctcaagtatttacttgcaaaaatgcctgctgcccccgcaggattcatggaactcgttcagtggcttcacgaaaacactcaagctcgctgcaccgtgtacgccatgattggagctgctggcaatggacatcttgaaatggtgcagtggctccatgccaactacacggaagggtgtaccccgttagccatgcacctggcagcaggacgcggccatcttgatgtggtgcagtggctccacgctaatcggctggagtgttgcctgcgagatacaatacaaacctgtgcggcttgtggcaagctagacatggtcaagtggttgtatgctaaccggagtgaagccttcaaccttcgaagaactatggaagatgctactgcacacggtcacttagatgttgtgcagtggttgcacgacaatttcgatgatggatggaccacagccgccatggataacgctgctgaaaatggtcacctggatgtcgtgaagtggctgcatgagcaccgccaagaagggtgtacaacctatgcgatggatgctgcagctacgaatggacacttggaggtggtaaaatggctgcatgccagtcgagaggagggctgcactacggatgcacatctgaaagcggtgcttgggaggtgatcaagtggctgtgccagttccgcacggagggatgtacgactgacgcgatcgaagcggctctccaattcccacatatacacggcttagagatagccgagctgcttttcaccaagtttccaaattgtcgggattttgaactggagtccccgattcatctcgaacgagtagagattatcgagtggctggttgaacgtgctccaagtatgctgactgggagtactcttgtcatcaatacctggaattggtaccttcgcgactatcttcggctgcgtcagtggcgggtagtcgaccgtaactactctacgttgacgctgcgaaaacaggcttctagcgaccgaagggaccatggtctcagtgcggcgtcatttgttttaaactaatactcggctgctttctcttatcattgttcgacttgggttcattgcttcgggatcttcgcattgaaggagaaaaaatatcgcgaagcccagatacgcgtcgcagagaacctattcctgaaagcccatttttggccatatggcgcgagttagtggagtcacatcatgatatcttgacgctagtagcgtcacgctacaagctgggagaaatttactgtgaagcgacccaactacgtcacttagggcaccactttacgtacatgcaagcgcttttcacacagtctcggctttaatatataaatctttcactttaacgaatacccaagaaccgaacagacaatgaactcaaaagagtcaaacggcaataatgatgggttatctacccttccgcagagtgagcccgggttccggtctcttgtcgataagtatccagtcgaagacccaggcaaataacagtcattgcccctttttagccaataataggtcagtagcacgcgcaagtcctttcacagctcattgcctcagaagtctccctcaacctccctcgtcgctcaagaaacaacatgcgctgccacagaggcttctcggcctacgcaggcgacaaaggcaccgacatctcggacagcactgcacgcttcgcgcaagaacaagcctctcaagcggagccaggtgccaacaagacggcagagaattggctgcgaacgctggctggaagggctctgaagaagcgctgggagggggagacagcagagtttcggcaggactacatatagaagaaccctgacgctaccttttcgctggacgacaacccgctgggcttcgcggatggccggcaggatcgccggcgctatcctcgaatggtgcgagccgacatcgctacgcctgtggtactgcaggaagaggctccggtagcaccagctacgacacgcacacccgtcgacactcagtgtcgagaacaagttgatgaatttaagagctaccaggacgagctgctgcgggctgcgttcgtggccgaagtgacagcgcttgcgcacgcagtccgagcgaacgacgttagccgagttgtgtcacgttcggtggcagtagtagaatgtatgggcgcccaaattgcagcaagtttatcccccgattcaagagctcgtgttgtgggagtcatccgtgacgtgacagcgtatatgcaagctgcacgaacacaactgactatgcactctgatgaagaggcggatggcgcgcttcatgaaacgcagactagcgcagctgccgctaactcagcactgagcaactacgtgcgtgataccattcaagttaacctagacttcaaggccatgcacgagggcagggaaaactacacgaccagcaccaccaataactttcaggagttatattggctaggaaaagtaccctcggtgcgaactttgcaagctagtccaggctcgcctgctgtgtcaagtgatgcatcggctacatcaactacggtgtgtcaggcaggggcgtctgtggagagactcaatggatcggttgctgagggcgcggctaatagcagcaacgatgctcagatatcaccctcggctcaaacaaaacctaccactattacctctcgcaaacgcccccggttgctcgaaggaaagcagcgatccgccacgacaaattcaaagccacacgcaaccagcggaaaagagcaaccggctggtaatgccgcagatgatgaagatagcgtgtatgagccaagcaatacggaggaaagtgacgtgaatgatgacgatgttgaccccccccgaatcggttttccagaaagcgcgtgtcaaaaaatgatcctctgatagtgtggaccgatctcgaagatgacgatcacccccgaacagtgcacgtttaccctgtggatttggatagcttgcagactggtgcttggttgacccaaactgcgctggattatcttatctgtcgctatatggagcgagttaaaggattaattcgcctatgtgactcggagttgtacgtattgatggagactgcatgattcacgcgaaagccgaaacgaaaacgccgactgttggctgacctagtcgcattgtttgactggtcggcctaccagtatatgcttctcccagtatcgggtcgcaatcactacagctttttggtaattgagaaccccatgcacccggggccaacaaaagtttatcacgtcaactcgatgaaaaatgctcacagctcggcttatgcttttgacgttctgcaatgggtcctatcagagacccataaatcccaagcagaatcttcggctccgtttgagtggagcacctttgtccatttgaccaagccccagcaatcaaattgcatcgactgtggagtttacgtgctccattacatggatgtgatttcaaaacacattgcagccgagaagcctggatcgatcgaggagaagatcgccgcgtggacagggggtgatttcggcgtcaagaaggcagcagcataccgagctaagttgtataggactatatctccagcttgattaattgttgcacccggtgagtagaaacacaattaacttctttttaacacggttccggttattgacgttatggctcaatgcagcaagtatcggaatatgtagtaccgcaaaacatcactgcggtacctaccgcaatacaacactgcggtacctaccgcaatacatcactgcggtaccgcactgtaatactgctgtaccgcatgcattgcggtaccgcgtaggatcactgcggttcaaacaatacccacgggttaatagaaaggaggtgcgttcgtcatgtttttctgtggttgatactcgactgcttggcgatattctcaagtgcgacttgtagtacttcatcctatatgtattcaactagatttagcgttgcttcactgttcaaactgtgattcctggcgcgtcatccgtaggactacggtgaacacatacgtccgactattgacgagttctgaaatattgcaagatacggttggcatcgcggggcgtggtcacaatcgttgggactgggatcggagatagtagtcgtggaaacggagcagtgagatacagcaatagcttggacagcatctttgatctcgcccgcatgtttcgctatccagttcagagatatgttatgggtacgccggtactcctccaatacttgcacggctagattagttgcatcgacgtcagacacccgagccgacgtgagaatatcatctgcaaccgcagcgactaagctgtaaattgaccgccctctattgatgaaccgtcgttcgtccgcactacaccactttgtgccaaacagatcctcaagatctcggacagctcagtagccaacccccaccgaagtttatactttgtccgatcactttgcacgtcaatagctatcggcaaagctgacggcactacatgagcggtatcgccgtcgccttcgcgcccaccagatagaagctgaacttgtacaacagcagtgccgccttgcagaggtgccaaacacgcgcattacgtcactgaggctaccttgaaccgttcgcatggtcgagcagacttgagctaaagaactcttgaaatcctggtgtagcccgtcgattttggcgtttaacaccggtacagctttctgaagacgctgttcagttggatcttccattgcttcaacagcttgcataacctcacttttaaattccgtgaactcccgggattgaaatatgcggtgctgccaaattgggtgcgttggtgcggatttctgcaaaaaatacagcatcctggaggacgaccttacggagatattggagcaactcgagaaaacctccggccgcaagcgattgttccgctgttcctgaagcactggcctgttgccaaacctccacctgcggaaataccatactctgcaatcctagcgggggatcaacataagctcgggcaacaaaaaagctctcaatactcggttcaaaaccggcaagtgtgcgcatcgcctgcctcggaagagatgtgaggtaacatttctccattgattggccgttccatcgacccaaacgacgaatctgggactcacttgcgcctcctaagtccgccatacgcgatccggatccgcgaccaacgtgagttttcgctttgctgtggacgccgacatgtttcaacgccgctgtgatagctgcattgtgaactttgtacgacattggcttcgtggggtgtttacctgttttcaagagctttatcggataccagctctctgaagacgtaaagttgggaaatgcctcgccatccacatgccaacgccaaaacaagtacaatccaagaattccatgggggcagatctcgacatgcttattgcgcatgcaagcgccgacttcaatgcgccccacttggttggttttaccctgtcgcatcaccataaccagagccctgcatggcatgtagccctcgttttcgagaacaatcgagtgtaagtctgccaattccatcattcgcgccgactctcctctcataagggcgtagtggctcagtagaaaagcaaccaaatgccgcaagtttttgcctgaattgcgtgtcgatgtccagaaataccgagctatctccttaacttgatcgattgtcgtataaccatccagtagtatatcagctccacggtcctcaaaacttttccgcttcctctcgtcttcttcgtactctgtcaacttcaatagggtcgtcacagcttcgtctctgggggagggattgctgttcactttagcccaagattgctgcttccataggtcaaccatcgcagcaacgtaggagttcacagtagaacgtccgacggtttcaattctgtcgctgggtgtatttccactcttgtggcgcttggtccggccaattacacgctcttgtaggaagagatggagcttctcaccagtaactgtaagccgggtctggttgttcaatgctactcctttttccgagcaccagtctaagaactcctgctgccgactgctgtatgctctctgcgtgttcttcggtcgaagggtagtggccttctcgtaggtccgctggacagactccttcagggcgacctgcattcgagtctctgcctccgtgctgcccattgttccaagctgtcccctgcactcgagtctcttctttccgtgctggcttggtgcgcgtctagcggcttggcccctagccgcaaaattagacgtaattttgcccaaccagcatctagaagacccctcgtcaaataaacagttatttcacccccaaaacgtgagataactacaatgatttgatcgaaagccaccagtgctgaccggtcccggtccggaccccagtggtggtaattacgaatgatatgctaccagcgaaaaaaaacatttcaagcagaaaacaggtatgtgaaaaaaatgacgcctccacgagaaacgagaccatagcccctgcagccgctagtgctctgccttcgtagcaaaaaagtagttccaactacgactgactacctgccactgatgcagccgaaggtagtcccaaaggtacatatcacaggtactgacgctaagagtgcacccattaagcgcatttggagcgcgctccaacaaccactccactatctcgagtcgaaatactttgaagggcgactccagcgtgatacttcggcaaattgggagttttgtgaatagcagctctacgatttccagacagtgcgatctcagctggaatcgcagcgtagtttcgatcgcctcgctagtacatccctcggtgcgattctggcacagccacttgaccatcttgagattatttctcaaagctgctccatccattgctctcgtagtgcagccctcatctcgattggcatgtagccatttcaccacttccaagtgcccgtttgtagctgcagcgtccattgcatgagcagtgcacccttcctgacggtgttcgtgcagccactccaccacttccagatgcccgttcccggccgctctgtccatggcttttgtagtacagccttcgtcgcggttgccgtgaaaccactctaccacatccaggtgaccacgggcagcagccgcgtccatggttccatcgtggtcgaaatcttgatgtatattagcatacagccacttgactggcatcgtgtcaggccggcaatcttcctgtcggttttcgtgaagccacttgaccgtatccaggtgaccgcagacagcagcattgtacatggcgagcggtgtagtcccctctgtgcgattcgcatggagccatttcactacgtcgagacgtccacactcagcagccctttccacggcaacgaccgagccctgcgcctgggtattctcgtgaagctactgaagaactttcatgcttcctgtgtgggcaacacgacccaagtgcgagtccctcacgcgtctgacatcttctcgtgcaaatacttcagcacgtccaggtggtctttgtacgcagctcaccgaaaagcgcgaccgatttcgtcaagcttttcctcttcaagaaaccacttgacgacgtccaaatggccatgctccgctgccagctccagagcatgtacgggttcttgcaataacgctcgacaagaaaaaaacttgagcgtctccaaatcgcctaagtctgcgcgatgcgagtatacataaccaatctgaacaccaccaaccagggcttcctgcgagaaattctccaaaagccaccgagctacatgtcactggtgcccaatcgtcgccgtataaaaagcattctcgacgtccacctcaaagttctcgtatactcacttcacgatcctcaggttcccgtagtatgccgcacgatacatcaaatactgggcactttgaggtccaagcacaaccttttctcgtaaccagtccgctacgtcgtagtgatgcttgcagatggctcgagccagctcacagtctcgccagtagcctcgactgcgatagttctccgacatccatttcaagatgtgcaagtggccattagctgcagctgcagtgacgacttccgtgagaaattctccgggcaagtagctctcagcgacccattttaacgttctcatatctccacgcgccgctgctttacctgccaaattatctccgtcccaccgccgaagaacagagatcttcgtcttggattcatgggccgccaggtactgaagtagacgcagactgccacccgacatttcgtacacagtggtcaacgttagcgtgtcggagagttcatccagaaaggaatcaatcactcggaggacgctgtcatctccatccaggtgaagacgttcgcgacacacgagacccgcggcagtgaagactgggaagatgtgccactcacttgtgtccatcgtcgtaacctgccggctcattccgggggacggctccagctttttcccttcgccgagaattttgtagcgtaagtaagtaacttaggagataatgggatttccctgtctcatattgctttcttaccgcattaaatctcgcgaagctgacagtgtaatatcttttttctgattgtcatcttccgctcgcgtcatgatggcttatgccgaattacaagcaaggagttgagctcgattcttgctactccaccggcaagagccactccttctcatgccgagttgcaatcttcaagagtggaaaggagaagggtgtggcggataacgatgcctccattctgtgatgttcgagatgcgtgttgccggatatttctggtgcattgctgtgtaatggccggccgctgtagctaggaagcgtattttttgcccatttgcagctaaggtgttacacaatacgttgctgtggtgtttgaatacgggttttgacttcctctggttgtcaaggattctacgtacgagctttcggatggaagtttgtgcttgctccagtgcaaagctgctcagaatccaagtcaaagggcatttttcctccgacggtgtgatgttaatgtcgtgacagaccaagaagggggcttgagaatgctgaaatgggccggtgggggccattttaccgtaccatttttcaccgaagtcgtcactcgggccgcatccaggtcccacttgcacttcctgaaaagtatctgggataaccgccacagcagaggccaatagggtagaggccgggattgaagtatttgcacgacaagatgccagtcgttttttttcttaccgtacgatgcaggtctctagccaatactaccttaatttctgattgtgatatttcacacgcttcatgaatagtaaatgccaaatctcgagtagagtggccgactcagctctggccaggaccactactgctcatgccaagttactttttaatgactcaagataagggaacattatcgggtatcgcaacgatattatgttgaggagtcgtgtcgccaaatattcctgatgcattgggcaagttgtgcaatggccgaccacggttgctgggaagcgtacttggcccatttgcagctatatacaggactttgttcgcgcacacatcttgttttggtgcagtacacaccgtgaacacccatttcaatatccaaaacactgcggatgtttgttatggagcaattcatggccagcgtgcgtacggtatttgtctcatcgatgaagcttaccgggtatgcttacatgacttaccaagcatgaacggcgagccctgcgagcggcttcctcgtcaggaatgtgttggctcgaataatgatttttccgtggagttcctttggttttatttattagtggcacgtattcctgagatcgtgagcaagaagcgaagtggcgcgtttccagttacgaggggaagatgcatacttagtagcgaactagtgtgtcagtacgacacatcaatcgataatggttggatcctcagctctgcttctgatccgtatgtgtttgtgttctatatacttggtttgaagtactagcttcctttcacacggttaaagtgctgccgttttttagctgcaaggcgttttcagaacgcgacgacaagaacaatttaaaaagcgctgcagatcagtaaaccccggtctcaaggtatagatagctaaagtcgactctagacgcatcaaatgcaattaacgtcctgtgcgacgcctatctgggttttgtgtttttttttcgtcttcagtgtgaagaggatcagaaagcatgcgtgcattagtcgtaaagaatgacgtcgcaacatgagactatagtcccttcagccactagcgccctgctttcgcagctcaacttaagagtcctgacgatcgactacacgccactgacgcagccgaagatagtcgcaaaagtaccaattccaatcattgacctgaagagtactccgggtcagcaaatctggtgctcgtttatccagccactcgactatctcggctcgttcaacagggaaccgtgacgtcagtcgaaaatcccgacagtttggaaacgttttgaaaagcagctcggctatctctaagttaccgagctcgagcgcatctctgatcgcgcgccacgtacacccctccgtgcggaactggcacagccacttgaccacctcccattcaccgttttcagctgcccaatccactgcacccatagtgcagccctcatctcggttggagtgcaaccatttcactacctccaagtgcccctccgaagctgcggcattcatcgcataggttgtgcacccctctcgacggtgctcatgcagccacttgacgacatcaaggtggccattttcagctgcattatccatggctgttgtagtccatccttcgtcgcagttttcgtgcaaccactgcacaacatccaagtggtcgagtgcagcagcatcgtccatacctctgctatattcggaagaagaaaaggtgaaagcttcgctccggttggcgtacagccacttcgcaatgtctaggtggccaccagcggcacaatattgtagtgtacttctcttgcaaccctccggccgattatcatgaagccacttgaccaactccaggtgaccgtttttagctgccatagccatggctgacgaggtccacccttccgtatagttggcatggagccactgcgttatctcaaggtgcccgttgccagcagcccaatccatggcgtacacggtgcagcgatgagtatttcgtgcaaccactggacgacttgcatgaatcctgagcgggcagcagggtccaaatccgattccctgcagccgtctggcctcttctcgtgcaaatacttgatcacgtccaggtggcccttgttcgcagctcgctggaatgccccactaactagtgggatctcgttctcttccagaggccacgttactatatgtaattggccatgctcagctgccacctccagaacttttacgggatctcgtactaaccctcgaccggaaacaaatttgagcatctccaggttgcccacctctgttggatagtcggagaatactctgggatactcgggagcatcagccaggtcttctggcgaagcattctccagaaaccattgcgtgactttccactggcctgtcaacgcggctgtggacactgcgcccgtaacctccagctcaaagttctcatatnnnnnnnnnnnnnnnnnnnnnnnnnnnnnnnnnnnnnnnnnnnnnnnnnnnnnnnnnnnnnnnnnnnnnnnnnnnnnnnnnnnnnnnnnnnnnnnnnnnnatgcagccacttgacgacatcaaggtggccattttcagctgcattatccatggctgttgtagtccatccttcgtcgcagttttcgtgcaaccactgcacaacatccaagtggtcgagtgcagcagcatcgtccatacctctgctatattcggaagaagaaaaggtgaaagcttcgctccggttggcgtacagccacttcgcaatgtctaggtggccaccagcggcacaatattgtagtgtacttctcttgcaaccctccggccgattatcatgaagccacttgaccaactccaggtgaccgtttttagctgccatagccatggctgacgaggtccacccttccgtatagttggcatggagccactgcgctatctcaaggtgcccgttgccagcagcccaatccatggcgtacacggtgcagcgatgagtatttcgtgcaaccactggacgacttgcatgaatcctgagcgggcagcagggtccaaatccgattccctgcagccgtctggcctcttctcgtgcaaatacttgatcacgtccaggtggcccttgttcgcagctcgctggaatgccccactaactagtgggatctcgttctcttccagaggccacgttactatatgtaattggccatgctcagctgccacctccagaacttttacgggatctcgtactaaccctcgaccggaaacaaatttgagcatctccaggttgcccacctctgttggatagtcggagaatactctgggatactcgggagcatcagccaggtcttctggcgaagcattctccagaaaccattgcgtgactttccactggcctgtcaacgcggctgtggacactgcgcccgtaacctccagctcaaagttctcatatagccactgcacgatccctacatccccactcctgaccgcagtgagtatcaagtgctgagcagactcaggtcgaagcgaaacattttcccgtagccagtccacttcgtcctggtggtggttgaggatagccccttccagctcaccccctccccagcagcctctgcttcgatggttgtcccacagccaagttaaaatgcgcaggtgggcgttagacgcagctgcagcgacgagttcagtgaggacttccccagggaaatagctctcagcgacccactttagcgttcccaaatctcccgtgctgctgctagacctgccacgttgttgccgtcccaccgccgaagaatagaattcttcatcttggattcatgggccgccaggtactgaagaggtgaagaggacgtagactgccacccgaaatcttgtacgcagaggtcaacgtcaacgagtcggagagttcatcaaggaaggagtcgatcactcggagcacgctgtcgtttacatctacgttgagacgttcgcgacagacgagacgcgcggcagtgaagactgggaaggcgacgtgtccaccgtgccttgccaatccattgttgctataatagcttcgaaggagcttttgcaatgtgaatgatgatgcgtcgcatctccaaaaatttgtggtccactgagagagaatactgagtcccacaaacaattcaggcacataatttcgcatttttatactatcgaatatttattttgttgtgcaattattgtttataaatttttgcaggacgaatgtttaaatgacaacttacgttatgtgaatgttttagctgcatttactcttgtggctggaaaatgagtccattcatcgatatcagtcctactcagatctcaaacctggcacggtagcatgataagcttaagctacgaagtatggtgcacgagcaatcccctcgctgcaaaggggccgaagtattcttcccagcaactacggtcgactattgcacaatgcttgagcaacgcgtcaggaatatccagcgacacaaatcccgtataaaacagaataaagtgatcgccatccccaactgccttctccttttccgcctgaaactcagcagcagaaagtggtttgcccccagcaacttgcttgaatccgtgaacctcgtgaaaaaccctcttgtaccatcttctaagcaaagaaaggaacgtctaggcgacgaccccgtcgcattctggtataacaaaaagcggttttcagaatccaagtcacacgtgcaactcccaagcggagccaattcaactttgcgcggaacctcccgcacgaagcgatcaaagccagatccaaggcgagctccagagtgtacaattccccacaacaacggtgattccggagcaaaagccattgatttcaaaactcgaaacttgctgtagaattcatcccaggcttgctgcggcaagatatcctgacgtgaatccactgggacatagctgtcaaactctctccaaggatttccatccgccgtgagcatcaaatacaacacgtacggacactgaagaaatgcatcccgcaatctgatcaaacccgctgaaataacttggtcgagagtagcgtttccgaacatagtactcttgtaaacaactcgacgagcaacagcagccagaaacgcctcacgcatagcgtcaattgacgttagaatagccgggtaggcttcgaaaagtgctttcaccacacgtttcagcacttttgcaaagtcgaatgtaccgttttgaccgatactttgcatcacggtgtagagaacttcgaggcatcgactaaacccacccatgtcgtcaaccagaagctgcaccagagcgtcactcccataccccaggaaaacatcctcgccttgtatcttcggacgggccagcatcgccggttggaggtgaagatgccactgagaagacatcgagaaaaaattatccactggtttgtaactagtcgcagaggcggttgcaagcacccaacacttggacgcattcacgagatcacagagggtgcctagtccatagtgaaactgcgatgctgagtttccagattgaagatctaaattgtccagattgtctacacacaagatcacgcacagttggtgcggaggcaagcctttcagccgtcccagcctcgagaagactgaacttggggtcaaatgattggccggatttagacggaacgtctcccatgggtgtaaatcctgaagctggtacagcatgcgagtgccgatggccaaactagcgtcagcaaagctgtccgcatggctttgctcctcgaaggcgacgttaaacgtgaacgcgttctgcagcatcgagagcatttcctcgttcttgtggcccttgagcacgtcgtttacaagcctggggaattcgtttaagagccgcgacttgcctgttcctgggccgtccaggcagagcacgagagggtggcattgcgcgcactgagcgttacatttccaagcatcaaagtgtcgggggatagcttgggcgaggatgccgaggtcggatggctcctggaaatcccattgagaccccacagaggttaccaatggcttagcagctcgtggggaaaacttgatagatggcggctctgccatttgcgggtcgagtgaaaatgaatgcgtgtatacaagctggttggaggtttagcaactaacgtaaatagaggatctcttcaccggcaaaagctggttggaggtttcaatcatgtactaagtacaaatcaatcacaaaccgtcggattctttcataagaaaagctaaaagaaagaaagaagaagaagaagaagtactggtttgggggctttggcccgcggcgttcgcagttcggtcattttttttactgtaattcaaaacctgcacagtagaaaactttattttctactagtaatactatgtagcagcgctatgcttgccgcagaagagcgttgcatgaagacgttcttgaattttagcgcttgctcttatttttgtactgcgaaatatcatgcgtcaatttgctgggtggcttgcgctgctcgatctgccgtggcggatctacgtgaactcacactattgggctgctaccgcgggagtccccgtatgcggcgtgcagcagtgcgcggcgacgggcgtagtcagccgtcataaccgcaaatttcatttcattgcatgaactcacactagcgttactgctattcatggtacatactgcacagcttcaagctgccagactgagcttcggttcatgttgaatgtataatgtatttattttctggggttattcgggctatacaggggtcggacgatacagtatgaaattgtattgcgaggccaaagctgcagtagtaataacggcaatatgagggcaaccaataataataataataggtacaatttaagtatattgtaccattcgtgacatgagttattcattgccaaaatgtgacaggaaggccgcaaacttcacgcgaactttacgcaaacgtgatatcgaactattactgaggtgtcaggccaacctatacagtgagaaaatacaggtggaggctgatgacgattacaatagccctgtactgtttccaggacggttttgggaagtgttgttgtccggcaaagcgctattgagtatacaccgcttgctctcgcaacccaaggctgtgtcctcgacccgaaaaatagatattataatagtttattatagcattttcatcatttatgaacgcccaaccccagaattcatagtatttgatattgtattgctattattgggacagtgtcatattgtattggtttcatgaacttccaataataaataattgtcgtgggacacataataattgttttgctattattttttccgacccctggggctatatgtccaacttcgacgcctgcaacttgattttgtagaattgctatactgatttcaatgcagtttaggcctcctcacttcaaagtcgactctcaacaaacattctccacccacgaccattaatcaatagcgataattttgttgtactcaacgacggtttatagttgctgctgctgtggcgtccgacacgtacatacagataccgtatcttagaaataacagccacatgtctaaactaacttagccgatacgacggcgactctgctcgcttgctgccccgatacgatcgattcctcacagattacattgattgactgatcaccccactttattatcgctgctgcctggttagcttatcgacaaaaacttgctctgagctctaatgaatcgtttgcgctgctatgctgtactacaattgctgtacaactgtcattgctgttgtttcaaatagctctttaaccgataatgcaacatattacattatgtcaacataatacattatgtcaacataatacattatgttgcattatctcaaacatccgcaagggcgcaaacgacagctcttacgaactgcggatttgcttcaagtatgatatgattgtctatttcactcgacatcttgtataatagacaaacatgctcacccggcttagaacggccaggctctgtcaagcttcgggcggaagttgccgtcgttcatgggcgtgttggctttactgaaagataccgcgttcagagctctgcgggcgtcttccgtcatctgctcccacatgatgaggtcctggaacgtgccagccttgtcggtggtgtccagcgcgtggttaatgggccagtccatctcgtaattgaccttcacactgttgccgtccaggttctcaggatgaagaggggcgtacttcttgtacccatcgtgggtagacgccgaaatacccaggatcttgggctccgggacgtccgggttgtcgatctacacaacgacgtgctcccagtggaagcggtggcccattctcgacgacggcgagtccttgggaaagaaccagcagtacatgatggcccacacgtcattgtgccagcccgcacgcccgtagacgtgcgagccgtggccagagcctctgcaccctccttcggggcttcctgaagtctgaaggccgcactggtctcgccgatactgctcacaacggggtacgggacgcatccggagccaatacgaatttgcggtttgaacttgatagcggccttctccgagatcgtgacaggctcaggctgtgggaatggcttcacttcatcatggttgatggtcttcgtcacccacggagctggtggcggggtcggagccggagtcggtgcaggggttggtggaagcgtgggtgctggggtcgggggctccgtttcacgtgggtttcgtctcgttggcttgatggtcacattgggagtagccctcgggtacttagtagctagcgcgtctgaaacgtccaggtacttcacagtcggcttaggcgtgttgatgctgtctttttttttcgtgggcttttttttttattggaaaaggttatggtgttacttgcatgagctgaactctaatatccttgttgcagcgtaagtgatgagatcaccattctgcggtgtgttctgtaccctcgacgaattatccagtggcttgtgttgagagccgtacgtgttgatgctgtcttgctcttgatcttgggaagcgtcttgtttctgggcatgttcctgggccttggaaaccttttgaacgtttctgcttgagctgccacgattagcgctgccgacaggaagacgaagaacctcatcgagaggggctgcttcaaactggaagggtcttccgtgtaccgctcggagagtcgagaagtgagcggtgccgcagtctttcattggtttgagagtctcaaaccggcaacaacaggcacgggcttcgcaaagctcgtgatctggaaattgcaaccgattgtggcgatacatgtaccgcaccgtacatacatgtattacagtacaacactgaaatccctggtattgaatacatactaacgttagtacatgtcttcttgtcttcttgcggccaatccgaacgggtatccttggaggacttttgtacgttattgccttgttttcgcgttgtacataagacatgaaaaacatgtatgtaagatgtgtagagtagagtcctgaaaattgctggctcccctcagaaccattgtgcgcgattggggcttccgctattttgcggcccattacgctttactacttggtactcgccttgaacaggcacaaagtatacacagtctttattttgtgtttgggccctcgtgactaacgagtcgtgaatgaatcgaccccccaaaaaatctccccacttttcaaaatgcccctactatcaatggatacatatgtatagtaccgtatactagatttgtacatgtacttgttccaatcacaagatcaaaacgcacggtaatataacgaagcttaggttagctccgactagtagtaaagtgctggcgatataaataataagggcaaactgcctgaagctggggcacgaagttatgaatggcaacttagatgatgcacttccctgcctcagttcttcagctgagcctccaatccgtcgcggcagcagtgttcgacttgatgtctgtggtgttcgacaactgaaacttgtcggtgaagctgctgggtcgacatccctcgggttgatgtggctaactagcgatctcacaccgaaccatttcttctgtgttgttcttacgtcaactttggctggctgtgcaccctattttcttgcatgacgacagtccatagtccatagtatggggtaggaaacctgccgtattccacatgtagagagtgagtttcaccgagggacgacgttaccgccacacagagtgcacatagaaaagccaatatgtggtgtgtttgtggttcgaattgccacacactcgccacatatttcaacctggattggttggtcatttgtctaaacgggatgacgttttgtttgtcatagctacatgcctcgaccgtaaagcctgtttatagtatgagcaacaaaggcgaacaaaaccattgtttttactgaatgcacgttccggtgagatccccatcgatactctaaatgctgaccggtgacgctgtgtttctcaacctaatgcctgaagtacttcgtacctgtgacaacccgagaacatctccgtctacatgataagtatgcattggaatcatggtcacacgaccagcgaccaagttaaggtacacggccgtgaccaggtaaagcgtgtggtacaagaaactaaccacagcaatacaatcttgagtagctgtgtggtgtgaatttgacgtagctgtagggtgagttaagcaaagcaaatctaccgcattaatcattgtttttacctattccgaatcgattcagctaacgctaaaagcacggtgagacgagcggagcacttacatgaagagtgtcagccggagcgaattcaaatttgcatttatagtggccagaatggatatttgcttaatgtgcttcattgcgaacagaagaatgaaaattccgcaattgtagtcgtcggtctggtgcaggtcaataattcgctcttgtttgtacggatcatactcgcttctaaggtccgcttttaaatacgatcgccaactttgatcaagtcgatcgtagtagcactgcaggtggagaggatcaaactgatacatcgttctgcagcctactcgttggtcgaccagaatcatgcaccagtggaagttatcgaaacaaatcggaagaaccaaaaaccgagagacaccttggaaagatgtagcaagtgcatcatgcaacaacgcgtgctctggtttcgtataactgaagaagggtgtgtcgataaaacaagtgtctttgcggtatccaagataaacatggagcgccatcttgatgcacaagtcgttcatccagttgccgtctataaaggcaaacagatcatagaaaaacgcctcctacatgttacaatggcggtttagtatcaacatggacatttaaagttaaaatgttgtactaacaagattgccaagcgctaggcggctgaacacggacgttgttcggagtacatccacaatgttttgcacgacttcttgattaatccgaatctcgtcggcatgacttggaaatcaattcaagcatgaggaagctgctgctagatattgaaggcgctggtggaacatttacattgctgtaatagcggaagagtggaagcaatctccagcatccccagccttcacacaaatattatcaatgccttctccatccacacctacgtcatgaacaatttccccgttgacgcggcttgcatcgcgtttctcaatcatcgccgcctccaacataatgatgttatcgtaggctgtatccacaatctctttgtcgaatacaaatcgtagattcattggccgtttgccgtgtatcaaactgtactttgaattaaaagcaacgatcgagtttttatccacatttgaaaccatttcaaaacatttttcgtagagagagatcaatactgaagtagtcgtagggaaggtcaataatgctggcaagcgaagtaatctcttctgcatgatcgcggtgctgactcaacacgcctgcctcttgatacgggcaactcgaacttcaacggcgtctgcgttgtactcttttgtaatctcgtatttcatgttgcgcacatcttgccggatcacatccttacctttgaatttaggaaggttagttttgatcgctgtatgatttcggtaatacgtgaagctacagtacctgaggacgtaccgataaatctgttttaaatggcgatttagcttttattagctgttgaaccattgacaagacgactgggtctttcacgcgccggttttcagcatacattcgccatatcgtctcgttcacaggatgtgtatgaataggttccgattaatttactcggtagcagtattaccactttcgagtcgtcttgtttaacactctcgtgagagtcacagacaagcttgcttcacatgctgtcccgcgcaagtgctgaacaggtctcgttccgtttcctaaagaaaaaaaacttagtcacagtatataaccatgcacagcaggtaagccttgtatacctcggttgcggtccttccacccgtgcgtacagataaacaagacggagtaaaaccggccatactcgctgctgtactgcgcgtcttcttgtcttgatttattaaagtactcaatagagactgaactccttttcctgtaaaagaatattgaataaggtaagtctgactagacctcacagggaatgataactcaacgtacttgtacatctggtaagtgttcatgagacttcgggagcgccgccaatagatgcacatggacgaggagaacgtgtggacacatccgccgatgactcggaggatccgacggcgacgggagagccggcggcagccgggctctggatataccaatggctggtcagggagacccaagtatacttagatcaagtcaatcggaacccgggagtaatccgtctgatgagaggcaccaacgagcacaaggagaacaagaaggaaagcaggaggggaagactagagagtagtttgagagacgataacatttaatctcacttcggaatttgccccctcaaccacaagctacaaaccaacaggttaacagccgcaacaagctcaagccctccccgacaccgacatgacgacgtccagcaagaaggccgaagtcatcctgggaagcgacaattacttccactgggagttcgcgatgcgtatgacgctcgcgaggaaggggctgctggcgcacgtccaagtggtgaaggactcgacggagatgacggaggcctggatgctcaacgacatgaaggcgctcggtctaatcgctcaaggcgtggctgtggaacaccacacgaagattcggccggcgacgttggctatccaagcctggaatactctacgcgagttctaaaaccggacgacgatgcataatcgggtcacgatgactcgtcggctccacgagttcaagatggaggacggtgcgacgatggcgaagcacctggacaagttcgacgagctcatcgtgggcctccagacgcttggagagccgctcgatgactcccgacaactcgtcatcctgctgagcagcttgccggcggagtacgagttgatcgcatccatcgtcgagaactcgaaggacgtgaccgtcatcgaggtgaaggagcagctgctcaaggagtacgagcggcaggagaagaaggagacctcggagcgcgcgttgaaggctacctcgttcggaggtaggggccagaacgggaagttcggcaagggcggcaaggcatttggccgcaagcgcaacggcggacgaaaggtcggtggcttcaagggcaagtgcttcaactgtgaccaagtgggccacatgaagcgggactgcccggaaaaggcaaatggagacaccgccgaagactcggtgttcgctgtggcggagaatcaatcagcgggttggctgatcgatagtggggcgacggctcacatgacgcctcaccgcgatgacttgttcgagtacaacgagtcgtcggcggacatgtatgtgacaatcgcggacgggaagaagatcctcgtggctgggaaagggtcggtgcgcctaatgggcatcgacggcaagcgcatcaagatggtggaggtgctccacatccccggactcgaccggcgactactctcggttgtgaggttggctgaacgcggcatgggtgtcgagtttcagctgaagtcgtgcgtcatctgggacaagatgaaggtgatcgcttcggggaagaaggtcggtaaggcgtacttgctggactgccagcaggacatggcgtactacaccgagtactcgggagtcgacggaaagtgggagctatggcacgctcatatgggacacttgaacggagacgctatggcgaagacccgccaggcgacggacgggctcccgacgactcaacagcagatgaagaccctgtgcggaggatgcatgaagggcaagcagacggtcgcacattccccgtcgcggtcgacgtcggcgacgactcgaccgctggaactggttcatacggacgtgatgggtcctatgaagacgaagtccaagggcggagcgaggtatgtgctcacctttgtcgacgactacttgcgacacgtcgtggcgtacttattgaccaagaagagcgaggccgtgaccaagttcaagtcatttatggagctgtacgagaaccagtggggacagagcattaagtgcctgcgctcggacaatggcactgagttcgcgaacacgccgatgactgagatctgccgggtgaacgggattatgcatcagaagacggtcccgtatagcccccagcagaatggcttggcggagcggatgaaccgcacgatcatggagaaggttccatgcatgctacactacaagggcgtggcttcgatatggtgggcagaggcggtcagcactgctgtctacttgatcaaccggtcgacgaacagcatgcacccgaccaagactccgtacgagttgacgttcaagtcgaagcctcggctggaccatcttcgagtcttcgggtcgattggttacgcccatgtcgacaagtcgcgacgcaacgcaccaaattggagccgaaaagcttcaaatgtatgtttcttgggtacgccgacgactcaaaaggctaccgagtgtacgacttggagtcgaacaaggtgaaggtatccagatcggtgaagctggacgagcgcgaggtgaacggcatctacgacacggcgcccagcgagaactcgccgatcattcagtcgacggaagatgtcgacgatgaagtggtgctgcacgaggaaatgcaacgacctgccaccgacgagccgatggaatcggtggaagaggccgtcgaggacacggaaatacatgaggcggagacgtcggagccatccatgcaggagctgacaacgtaccgacgactcgcgaaaccggtatttaatgatgacatgatcttccatccggagctggaatgggcccggcgtgcctgagaaccggtactactacttggagatagttccgcagacggtgaggagtcgaaagaagatggtcccgatgactcggacaacgatggtcacttctggccaccgtctccgaagcgacccagggtggacgaagacagcctattggctgagacggtgctggcctacgccgcagacatcggcgatgccaataacgcacccaccacgtatcagcaggccatgcagagccacgagtcgtcggagtgggtgaaggcaatgaatgcggagctcaaggtacacgcgaacaacggatcatggacgctggtccgtcggacaccgagtgctcgaccgatcggttgccgctgggtgttcgcaaagaaacgcgacgagcacggccgagtcatcaggtataaggcccgcctggtggcgaaagagtttaagcagaagtatggcgtggacttcatcgagacgtactcgcccgtggccaacatgaactcgatctgagtggtgttgtcggtcgtggtggccgaggcgtacatcaccgagcagctggatgcggacaccgcctttctcaacagcgggctggtggagcgcgtctacatggaggtgccctacggaatcatcaacgcgaagaacatgatgtgtcggctgcagaaggcgatatgtggtctgaaggaggcggagaatgcctggcataagaccatccaccgagtcttcgcgggcatcggatttcggagctgcggtggcgaccagtgcgtatacgtcaagggcgagaagggcaggttcgaatatgtctgcctgtacgtggacgacatgatcatcgcggccaagacgagcaacgagatccaggaagtcaaggtggcgctcaagaatgcgtttaagatgaaggtgttgggcgaggccaagtttatacttggtatggagatcgaccatgactcatcggcgaagactctcatgatcaagcagactcgatacattgatgatgtggtgaagcggttcaaccagcaggacgccaaggtggtggtgaacccgtgcgagtcgggcctgaagttgtcgaagactcagtcgccgacgactcagaaggaacgcgaggaaatgcaggcgatgacctaccgagcactcattggccgtttgctgtacattacaacgtgcaccagacctgatgtggcgtacatcatgacccagttgtcgcgcttccttgagaaccccgagcagcagcactggaaggctgccatccgcgtgctcaggtatctgaagagcacacaagacatcggcatcgcctacaatgggaatgcgaagaaggccgaggtgacggcgtacaccgacgccgactggggcagcaatctcgacgaccgacgctcggtgtcgggcatcatggtgatgattagcggggcgctggtggtcttcaagtcgaagtaccagcgcacggtggcgctcagctcggcggaggccgagtacatggcgctgagcctgtgcacgcaggaggtgctgtggacccgcgccatgctcaaggacatgggtcacgagcaagtgggagctacccaagtatgggaggacaaccagggtgcgatcgccctcgcaagcaacgctgggtacaacgcgaggaccaagcacgtggacatcaagcatcagttcatccgcgagaatgtgtcccgaggactcatcgtcgccaacttcgtgccgacggaggaccagctcgcggacatgcttaccaaggcgttggggacgaagaggctcaagtacctgatcaacgcaagcggaatcgtcgggagggtcgtgcagcattagcggtgagtgggagtgttcatgagacttcgggagcgccgccaatagatgcacatggacgaggagaacgtgtggacacatccgccgatgactcggaggatccgacggcgacggtagagccggcggcagccgggctctggatataccaatggctggtcagggagacccaagtatacttagatcaagtcaatcggaacccgggagtaatccgtctgatgagaggcaccaacgagcacaaggagaacaagaaggaaagcaggaggggaagactagagagtagtttgagagacgatgacatttaatctcacttcggaatttgccccctcaaccacaagctacaaaccaacataagtactctcacaatactcccctaaagctgcctcgtagtcgtcccaacaaagaaatgttgtgcgctccatccgtcgagactccgactctccgtacgtacccgtgcctgttgtaccgtcatgctcatctgtcctacctccgcggattcctgcaccaccctctgctgcaccaccctccgttggagctaaaccagggcgacgccaactcccggcgccgccaccgctgtcaccgccgtccaccaggtcccgctccatcgatgtcgttgtgtatcagtgtgaactgccaacgcttgtctcctctcccaaaaataaaccacatgttgatttttgtggggcaactcaccagcaacttaagcaacttcaacgatttaactgcacacggcacgacatacaacagcgggccaagaacgcagcgtaaatcgtactactacatcgaatagatcatcactggaggtggaggctccacgcctacacaattttccccgccactacattcaactgatcgacagccgacaacagtgagtatgtgtgacttgttgcaccttcaggcaagtataacacggtagattgggagctggaactcccgccaagtacaacgtgtattgtttgttacttggagaattaattgagaactgatactaatctactgcctgcccttacatgccattgctggtagcccaggaaagccaggcagccaatcccaagcccgatcatgggtatccagtagtggcgcctagttaaactttgctaggatacaggttgtggattcgccaaccaccacagtatggcgaaggtggtttcacaatgaaaaataccgtagattggtaacgtctagcttaaaagttgcagtacgctgttcacatgctttcacactagtctactttttagggttccaagagccgatttcgttgggttaagtgccagaaggcgctgcgacagctagattagctaaaaggtcagcacccgccactaggcttagctgatgctcatgaagatcgacgcccaaacagtagctcccaaagagcatttttaaggatcaaaacagttagttgggcacacccacagctgacgatgatttatcgagtagatgagcgtgctcatctgcgcattctgatccacacccgggtatccgtggccagccgtgttgattctcgtggtcaccttatcggtgagcacgtcaaggaactgctccgcggctccacctctcagttatcatgtatgtagcacttctgaacttgaacacattacatatcttctcatgcttaaacgtgtcgaagcttcgtgatgccttggcgctgggtgcacgctcaaggatggacgagcgactcaaagcatgatgtttgacccactcctgggcacgaccgacacgggtcagatatcgtagagcactagcattaccgtctccttcccctgttaacgaggctgtcctcaagcgatagcgagcggaagtcgttcgggtcatgcatgtacaggaaccatatcgactatcttgcacgacattggagccgtactagacatgcatcccagcgctctgacgcgtgctgctggtcgtgacaagagcggtgccctgttccagcttagccctctgcctcctacttatcctcctagcactggttacggacctggttatcgacctgacaccaaatccagcgacagtagctcgcaatgcagagagatagcagacagggtccgctcggaccaaccaacccgaccccccgctgagcagaagtcactcgcctattagacggtgacctcagccattggcgggatgcatatttcactggagaggctgacgagcctgacgcagacgccgattaaggaagacgcggcagaggcgatatgcaaagtaggagccccaacctgtagatgaagcgttaccatctgcgggacaggtcgttgtaatcgttaggaagaactaatgtacctcaattcaaagcaaacaaaaacaaaatccagcggcaatagccaccaggtctcgacactaactttggataggcagttagttgacaatagccaccaaccggttaccacgggttataggtatcaatggatcagtgtcgacggcgctacaccaccacttgtcagacacgtctcgaccggactttcaagtaaagctgcgctatatcacttgggttctacaagatccgagtatctcctcactgcctatttaccagcggagtcattagctacgtaagccaccacaccaagccgccaacgtctcgttgaaaacagcagccccagatccgttggacgcagcctcaagttcgccgaggcgctgtagtgctgcttcttctcgcgggttattacgcttaggaaacaagatagccgtaccgtgcgcaaactcctattaatattacagccatatgaaaactccaaccacaaatgcgccacatacgaagtcacatacgctccacacacgtgtgtggatataatcactccgttcaccgagtgcccccccccccgtaaaaaagcaaatcccaaagctaagtttgacggacccgattcgcacatatattttagctaaccggacagaaacataatgttactacttttttaaagttaaaaatatgtatttattaatatatactaatatatatatatatactcagcaaacgattgaatgggatagaaaatcgagttaacaccttgtctccgaacgtcgtaagttacgacatgtctgttttttatgtcgtaagttacgacattgagcgcgttatactagaaaaacgtaaagacacgattttctcatactttaatcaagtttatttcaagcaaccgcaacctataaggtgcgagaggtatctgcgacaagctcacagaaccgggtcagaggatgggttcaagtgggtgaaagattccagtttgatccagagcctggacagtttggtccagagtccggacagtacgtccagagttggaccagacagatatccttcagtgaaggataagtgaagggccttcacccagcacacgacgttgacttgagacacttttggcggcagcttagggttaccggctagacctagggaagcgcgccgtgtagcgcacgcccggcaagaacgcaggcaagcgcaagaagacacagtaggaactgcagcttccccgcgaagaaggaagcgatggtggacaatgacagcaatgacagtgagcgtgtaggttgcgtttcagttagtcagtggtcagtttcgtgtggttgaataaaagtttgttgagccaatgcaccttctttcatgtgatttctgatcggagctgcagaacagtgcacctcatcagccatccgttgactgtaagtggggtcatttacgacattgagcggcgattgctctatttctatgtcgtattacgtacaacattggcgagaaaacttgatgacaatttatacacctatcccgacgagaaacacatggtcattacaaatatcaagtgaatctgtaagtcgtaacttacgacatgcgcttacgcgcctgaggcgagtaccgttcggagacaaggtgttaacttgaaacccggtaattgaagccggtagctgagggcggtattgtggttccttatcactgtgtggcttctctggcgataactcggtaactggagctgtagctgaggccgggtgtagtatactcaccttctgtatgtgttgtcggcgacaacttgtcgccctgcccgcactccgcttaggtacgctcctgatgctgcttgaaactatcttgccatcatcccgcattatgggaacctcacgccatggcacacaacgtgaacgccatgctgttcagtcagtgcggccaacgaactgaatgtcatccggagggatattagaatctatcacgtgtcgcgagtgccctggatgggacggtcaagcgttgtatggaaactagaacggttaggcagtggcacaaatagcgagaaacagagtcaatatgcaaaagcaatcaacttgttctctccagtgcagattcacgactgaccctacttccttaccgcgcacggagcctgacagctcgtgctttcttcttgtttcggctctctgtcggctcacgtgccgacttcaacacgtcaccagctcacctggctctcgtctcaccccttcgtccttggctcacctcacagctcacgtcccgagccacgcggtgctcgtgacctccgtcctgcccttcgtgtcactgctcacccatcactcgcgtcactgcttccatcgcaaccgagcgcgccacctaaccgacgcgtcgccagtcagcgcccctccgaaatggatgactgcccgctcaccgcatcgtcccacagctgatcctccagaagtcgatcgctggtcgaacggtcgtccgtgtagtaggaacggtggtgaccgttcctactcgggacacacctaagctaatgttagtgcgaccctgtcagactcgttgcaccgcgaaactcgtacctcatatttcgaccacatacgcagcgtttggcgtcacgaatcgacccaaatctcaagtttagggcagcaaaagtcatccagcatcatttaatagtcaatattgctgccgtagatttttttaatttttctaggaaatgacatagaataattggggcgatttccgcagctgtttcctgaatcccggagcgttcggttagtagaattcgcggtcgaaaatgcggtagaagaaccaaccggcccagtttccggtctcgatcgagcattgaatggatgacataaggctgccagcttattataaccatgaaatctttcgtgaagcggtagcaatgaagcaggtaactgcggcggtctcaagccagtggcccacctttccagtcttcactaccgcgcgtctcgtgtgtcacgaacatcttcacctatttaatagatgggggcgacagcgtgctccgagtgatcgactcctttctgagcggcctcacgaacttgttgagtttggtcactgcgtacacgatttcgaatggcagcctgcgtctacttcagtatctggccgcccatgaatccaagacaaaggacacttctctccggcggtgggacggcaacaacgtggcacgagacgcatcggcacatggagacctgagaactgtaaaatgggtggttgagagctttttacccggagagttccgtcgccgaagctgcgtcttacggtcaattgcacatcttgaagtggctttttgggagaataatcgtagcagatgctactggggaggaattgagctggaaggaaccaccaccaggccgttgtggactggttacgagaaaatgttgcgcttggtcctgaatgtgtgatggaaggtatggatcttggacacgaagctcggacgaagcggagggagggacgtcgcagacggcgggaccggagcgaaggtacttgaggggtagaatgaagattcgaaagtgattgaattgttggagcttacaccctactgttatagacacgcgaccctgcgtcctatcacctagtgcatctaatcaaccatcactcaccggtgttcatccaatcatcctactcgtctaatcatcggtggcgtaaacaacttaccgtaatcaccataatcaacgtgggttcggattggaccggttcgggttaaccggttactgggtacaactggtacacagtacccaagaccagcaaccctcaatacgccccctcaatgcgaagtcccacgaatgccgagagccaccgtcagatccgtgtggcgtggtcccgcaagcgccttcgtcatgatgtccgctagcatcacagaagtctcgcagtactggagcttgacttcgccgcgcttgacttcatcgcggatgtggtggtacttgatgtcgatgtgcttggcgcgaccgtggttcactgggttcttcgtcatcttgatggacgactggttgtcttcgcggatcatgagttcgggtccagtctcattagcggccgccagaatctcgcatagcaggcgaggaatccacttgccttcttggatagccagactgagcgcgatgtactccgcttcattgcttcttgcttccccagctcacaggcgcactcatgagcatgaacgtgtagcctgaagtggacttgcggtcggcgaggtcgccggcccagtccgcgtccgagtagccacgaaagtcgatcttgtcgcccggcttgaagcagatcccatgcgtcttggtgccttgcaggtagcgaaagatacgcttgaccgcaacccagtgttcctcttgggggttctccatgaagcgcgatacatagccaacggcgtacgcgatgtctgggcgcgtggcggtcatcaggtgcatcagagcaccaacagcttcgcgaaacggagcattcaccttggtcgccgcgtcgcttggaaccagtcgagtgctcatgtccaccggactcaccacggccttgcactcgtccatggcgaagcgcttcaggatgtcgtccacgtatcgccgctggcacatggtcacgctgccgtccgggccgtccaccaactcgatcccaagaacaaacgcgcacttgccgctgtcggtcatctcgaagcgcgtcttcaggtcggtcttcgtgcgtgcgatcagctcgggcgaactcccggtaatcagtacgtcatccacgtacaccagtacaagcacgcagtgaccgtccaccaccttgatgtagaggcacggatcgaaggccgacacttggaagccgatggagcacacgaactcgtcgaaggtctcgttccacactcgcgaagcttgcttgagaccgtagatggccttcaccagttccaggcagtcgaagtcaccattcagttcgacgccttctggaaccacgcagaagaccacctccttcattatcccgtacaggaatgctgtcaccacgtcgagttggtcgaggggccagccaaaatacttagcaattgcgatcaccatgcgcagcgtcacatacttgaccacgggcgagaacgtctcggtgtagtcaatgccgtacttctgcttgaagcccttggccacgaggcgcgccttgtacttctcgatcgagccgtccgctttgcgcttgatcttgaacacccacttggtatcgatggcgcgttgtccgttaggcaacttggcagctcgaaacacaccacgcagtcgcatcgacttgagctccgcgcggatcgctttgcgccagtgcacttgatcaggaccgttcacagcctcttggaacgtcgtcggctccgatagatcggctgctgcttccacagcgttggcactggcacgccaaaacactggaggcgtcgagtcgttgtcttcatcttggtccccagacttttcttcttcgtcggggtcggctcggcgcgaggaggatacgtccggcgcacttgcttcttctaagccagctcggtggcgaacggggcgcgatcttctggcagtgttgtcgtcgccactcggtcggtacttgcgcttccccgcctgcttgaagctcgtttggcgcggtccatcgttgtcgtccaggtccagcgcgtccaagtccagcacagcatcatcgacgtcttcatccgaagtatgcgtcgaaagtccaaaggtcgactcatcgaagttgacatcgcgactgataaccacctgccccgcctcgatgtcataaactcgatacgccttggacacttcttcgtagccgaggaacagcccggcgcgagccttggggtcccacttgcgccgtctttccttcggcgtcaggatgtacgtctggcatccgaacacacgcatgtgcttcacactcggcttggacttgtaaacgatctcgaacggagtcttgtgttcgatcttgggtgatggcagacgattcttcacgtagatggctgtcatggccgcctcagcccagaagctcttgtccagcttggcgtgatgcagcatgctgcggccaatcgtgacgatggtccggatggcgcgttctgccgtgccgttggtctggtgcgcgtacggaaccgtggtttgctgctcgatgccttcgacttcgtagaaggccttgagcgtgttggtcgcgaactcacgggctccgtcgtgccgcacaaacttgacttcttgccgaactgcgtctgcaccttcgtgacgtacatcttgatgcagtcctcgctctccgacttggcacgcaggcagaaccccttcatgcatccgctggcttcgtccacgatcagcagcagatacttgctgccacccagtgactcttcttccatggggccgcacacgtcgaagtggagcagctcgaacgtgtcgtagtgacgcttgtcacggttgcttgggaacggcttctggaccattttcccttgctggcagccgcgacacacgcttggtccactcgacttggaaggtgccttcgcgtccttgatcatgttgttgtcgaccatcttgcgaagcacctccaccggagcgtgacccatacgcgcgtgtaagtcgaccgccttcccactggtcgccgcattcgccgatcgctgaggcgtctggagccagtagagtccatccacgaggtttgccgtcgccaccacttgcttggagcccttgtgcgcaatctgcatcttggtgctgtcgaacacgacttggaacagaccactcttgttgatctgtggcaccgaaagcagattcttgctcatgcttgggacgtacagcgcgttcttgatctcgatgtcgcgctcgtcgacgtttggcagaaccactcgttccccacacccatgatggccgccttgttgccgtcggccaccgaaagttcgccttcattccgctcaatcaaatgagcgaacttggccttgtcgttgcagatgtggtgcgttgcgccgctgtcgaccgtccacaacccggacacattcttgcccgtcgaaatgccacgctccagtgagaccgcgaacgccactcgatcatagccgtagtcgtagttgtagctggcgtcgtcgttcctccactgggcattgttggccccgcgtccacggccattgccattgccgccgcgtcttgggccccgattctcgtccttctgcttggtccagcacttgtcaatcgtgtgccccaatttcccgcagtacgtacactggcgagactctcggtcggtgttgaacgccttggccgcattctccgtcttcaccgtcgccgtcttctcgccatgtctcttgatgtgctcattcgtcagcaccttcacgacgtcttgcgatcgtagttcagcgctgctcatctccaagttcagcacgacgttctcgtagctcttggggaggctgcgcaacaggcagatcgccacgtcctcatcctccatcttggcgccgatgctgctgagcttggcgctgatgttgaggacctcgttgcaatgatgcaagacgttgccgccttccgacatctccatgctgaagagtcggcgcttcaggtagatgcgtccagccttctgcgaaccaccgtacagcgtcttcaggcgcgtccacgcaacccacgcttcctcgcagtcgtcgaccacatggtggtagtccgcgtccatgtggagcaacatcagtccgaacgcgatgttgctcgacttgacgtagtcgtccttggcccgcgagtccgtgaagctcggcgtcgtctcgcggttcacgacatgccacgtcgacttggtcaggaacacgccacgcatgtagcggttccacgtcgcgtagttgtccccgttgaacttgtcaatggagaccttggtcgaggcgtcttgggcagaggacatggtgcttgggctcataacctgatggaaggtatggatcttggacacgaagctcggacgaagcggagggagggacgtcgcagacggcggggccggagcgaaggcacttgaggggtagaatgaagatttgaaagtgattgaattgttggagcttacaccctactgttatagacacgcgaccctgcgtcctatcacctagtgcatctaatcaaccatcactcaccggtgttcatccaatcatcctactcgtctaatcatcggtggcgtaaacaacttaccgtaatcaccataatcaacgtgggttcggattggaccggttcgggttaaccggttaatgggtacaactggtacacagtacccaagaccagcaaccctcaataatgtgcccaatatccgttaaaaccagcagcagcgagtggaaatatagggaccgttcagtggctttgcgaacatttgaaacaattggcgggaacccgggtacccatcgggaccccggttcccccaaaactaccggtacacatgtatgagcaaatgcattgaagtgttggtctatgacctacatagaacgcagctaaagctcagtaggggaacggaaggttaatttacattcgccctcgtcctgtatctctccacgaaaatccagtcgcttgcctggtgcagtggtacagtgcttcccggtctcatcgctatcctcctgctcatgaaagataaacttggacatggtaaggtatgttatttgggtctattcagtaccggtggcatattttgagagtagtcattcatcgacagcacttagatatgagggtttaacttgccccgagggcaccaatatggaggccaaaaattaaataaataattcgcgatttggtcggtatcatttgcgggaacccgggttcccgccaattgtttcatttcgagcgtaaagttgccgacgcttttgatgcagcagcgtcgaacggccagtgggctatcgtacgctggcttctgcgcggacaagacctggctgctgctctccggtctaagtacatctgtggaagctcaaactacatcaggggatgctcagcgccctggacttgctcaaatttctgtttgaccgagggctagtggaagatcccgtttgggttattgaggtgtccgctgagcacggtcggctggacatcgtcaaatggttattcgaaggaagagggattgatgacgttggtgacgcattccagcgagctgcagacaaaggacatcctgaagtatttgcacgaaaagatcccagacgattgcaagcgctcggatttggacagtgatgcccaagcaggattccttaacgtagttcagtggctacacgagaacacgcacgcccactgttcagtcgctgcgatggatggagctgcgcgcaatggacacttcaagatggtgcaatggctccccgataatcgcccagaggggtggacctcgtctgcaatgcatggtgcagttgaaaagggtcatcaggacgtggtcttgtggctccacgagaacagaacggagggttgtcgacgcgatacattgaaagtctgtgccgttcgcggcaacttggagatggtgaagtggttgaaggccaatagagatgaagatttcaatctcaacggaatcttggatgcagccgctggccgcgatcacctgtatgtcgtgcagtgggtgcatgaaaacctcaacgtaggatgtaatactcgagcgatggatggtgcagctttgaggggtcatctggattttgtgaaatggttgcacttgcaccgtcgagaagggtgcactacacgagcgatggatggcgcagctatcaacggacatggtcaaatggctgcatgctaaccgagatgagggctgtactacgagggcaatggatggagtagctaaaaagggtctactgaaagtggtcaagtggcttagccagttttgcaccgagcaatgtacggaccaggcgatcgtagtgacaatcgaagtcaacagcagcaacagtcttgagattgcggagatactcttctcaacattcccacagcgtcggtggtttgaattatcgcaggaatttatcgtttcgcgggtggagattgtggaatggttgcttgaacgtgctccagcctcgctaatcgggtgcattctttacatgagtccgtggaattggtacctccgtgactggttgcggctgcaccatgcgtcacttttttttatcaagctccatgacatgaagtggctaccgacttttttattgctatatgaaactactaaccacgtagttcaaaagaaaagtattttgatttcctttaccgtttagcgtgaattgttaccacagctctattgagaagctcccggccagttgcacataataccagacccaggtttacagtagtagcacgaagtaataatttcgtgaacgtgcacctctcattgatctttatattgattcaagctgtgatatgaaccacggaaaactgacgaagcagaagccagtcacaacagtactcgttccaggggctggcatgaatcgtgcgtccttttagcaagcgcagtcggcttgcatccctcggtacgattctgaatcagccactttaccactttagggtgagacccccatcgagctactccatccattgcattcgtcgtacagccttcctttcgattggcatgtagccacttgacgacttccaaatgtccatttgtagctgctccatccattgcattcgtggtgcacccttcgcttcggtgcccgtgcagccactgcactacatcaagatgaccgctacaagcagcccaatccatagctgcagtagtgcacccttcgttgcggttttcgtgcaaccactgcaccgcatccaagtgaccatttgcagcagctacgtccataactccgtcaaggtcgaacgcttcgctccgggtagagtgtagccacttgaccattacaagattcccctttgtggcacattctctcatcgtatcgtgttggcagccctcggatcgattctcatcaagccactggaccacgtcaatgtggccgcgtacaacggctaggtgcattgcttgagctgaacaaccttccgtgcgattagcgtgaagccatttcactgtttcaaggtggcctcttgcagctgccatatccatagcactcttggaacaaccggtatttacagtgtcgtgaagccattgcaccgtctcgagagagccgatcccagcagcgtaatccaaccccgcccagctactgtgccacatattcctttcgtggaaatatttcaatacgtttacccgcccttcgttggcagctcgacggaatgcgtgtgactcccctctcttcaacgaaccattcgacaatatgcacgtgaccacactcagcagcttcagtaaaaatctcccctaacttagtcgcgcctatacgaggagcaagtcgctttaaactgtccaatttcccttccctcgcgcaaaagtatccaagatttgtgatacctttgtcggataactcacttgaacagtcctcgagaatccacagcattacgtcaggttggtacctggatgttctgactacttcggacatggccacggtgaagttatcatgcaaccagcgtaccgtttcgacatcgcccttccttcctgccgattcgattgcgtattgtgcgccgtcggactgaggtgaaatgcgggtgcaaatccacttcgacacgcccaagtgtttattatccatggcacgaagcaactcgagccagccccaagagcatctacttcgacagttctcccataaccactccaacacgtgcaaatggccacttttggcagcttcttccaccaccaacgacataaactccttcggtaaataacattcagctagccaacgtacagtcttgaggtcaccacgtgctgctgcctcgccggcaacgttgttaaaggtccagcgacggaggattgggtcaatcgttggagattctccagccgccagatactgcagcgatcgaagaccaccattgaaatcttgataagcttcggataatgaaactgatcccgacgcttgacccagaaacccgtcgataatttgttgcaaccttccgtctccactcagcggaaggcagttgaggcagacgagatccactacggttagcgctgggaacgagggtagcgctgggaatgagggccattcagacgtgtcgaaacgattgaactgcggatgcatcgtatggttggtctcagcagtctattgcgaattctttcaatcacgaagaaaaggtcagacaagtcaatcctctgcaaatgcattttacaaataaaacttataagaaacgctgtattctagcatatagaatattggaacgcttcatcactttcatgttcaaaccctcaacctctcccccacagcacaaacaatggatagcatccgacaaggtgccaatggtgttgatacagccagtcacggaggtgccagtcccagacactgacttggagcgtagtgtggcgtatcaaaccaggcgaatgcttgaacaaccattccacaacctcgactcgagaaaccttgatcactgatatctgcccgttcattgggcgcttcggcatgagcagctctaatatctccaaacaggacgtcctctgataaaccatgtcgaacggcggcattgtcctccgacgattgtggtgtagccacttgaccatctgaaagtcgttcctcaccactgctccatccatcgctcgtttagtgcacccttcgctgcggttcaaatgcaaccaccggaccacattcaggtgcccattggacgctgccgaatccattgcacgcgtagtgcagccttcgtctcggttcgagtgcaaccacttgaccacgtccaggtgtccacatcctgccgctcgatccatcgctgcagtagtgcacactgcgttgcggttctcatgaagccattgcactacatccaagtcgccatttgccgccgctgtatccatagctccatcaaggttaaaatcttcgcttcggttagcatccagccactggatcatctccaagttgccacgttcggcacagcctttcattgtatctaggcggcaaccttccttgcggttctcatgtagccactggaccacgtcgaggtggccgttataagctgcccaatccattgccaaagccgtacacccttccgtgcgattaaagtggagccacttcactacatcgagatgaccataaccggccgctgcgtccatggcgttgactgtgcaccgagcgttagtattctcgtgaagccactggaccgtctcgagtgaccccgcctcagcagcgccgtccaaactcgatttattgcaggaatccttattttgcccgtgcaaatacaccaccacgttcacgtgcccattattggcagctcgatggaatccggtacaaatatcccggacatttttctttttgacgagccatttgacaacgcgtaagcggccgcactcggcagccacgttgaaaatctccattaggtcagccccgcgtctattcacaagcagttgctttaagatgcccagctttcctgccttggcgaggtaaaatccaagtctgccacagtcttggccagaaatcttgtctttatagctgttgaaaatccacgacaccaagttccaatgactacgcatcacggccaatctgaaagcttccaccaccttcaggtcggacgtctcgcacaaccacttgacagtctcgagatcaccaaatctcgcagcctcgtcaagtatcaactgtgcaccctgcgatcgaaaatcaatgcgataccgaagccactctgctatcccatagtgttgtcgttccatggctgcgctcaactcgatccatccccaaccgcatctgtggcggtggttctcccagagccactttaaaatgcgtaaatgaccagccgaaacagcctcttgcaccacggttgagataaattcagtcggcatgtaactctcaatcagccattgcagcgtctggaagtcgtcgcgtgctgctacgtggccagcaaggttgttgaagacccagcgacggagaattgggtccatggtcggaggttcttgagctgccacataccgcagacactgaagattaccgttgaattcttggtagacttcgagtaatgtcggagttttggacgtttggtcaaggaatccgtcaattattggctgcacacttctatccccgatgggaaggcacctgaagcaaacaagcctaacgagcaacgacagaggctgcatcttgtgctgctggaggctttttccgaagtgctgttgattcggtatcctgcgttccagtcaaattgtcttgtcctttcaatcacaaaaaggaccaggttgcctcgcgatggctatgattcgatgcccaacgcaagctcgaatcctaaacgcaaaagttcggataaagttagagcttagaaaacacaggaatgacatcacatactaagtattaatacctacactatcgatcagtctgcccaagatggggtcgccaaaagctatgaaatcagctgagtcgacaagttacaagtgcttactccacaacacgctatctgtgtggaagtttctcgagggcaatcacgatcttaatatccatgatcgatagcaacttctgtttcgtaggtcactgcgacattgcagcaacaactattcctccaacatcaacgacagtggcgcacacaacaacttcgaattcggtgatgcctaccaatgcgcccacgtcctatgggggtacgatttccggtcaaactatcgcctcagcttcattcgtcgacttgtaaataattgcacagtaggaaagctacgatacaaaaatacttcgaacaaagaggaaagttagagagcatcgcacaatttattttgaaataagcacgcttctctgattggtcgttccattttggtcccccttcccctattttaatcgtccaccagccagctccttcacaccaaccagagccgcagctcggtctcacttccatccagacctctccgccatgctggccatggccccacgcgccgcggagctgccgtcgtccgccgcgtctccgggcttcaaacccgccgcccaagtggttaacactagcctaaccgacgcgaacaagcccaccaatggcgcgctgcccttcaaggcgcaatgcaaatccgccgtggcgctggtgaacgagcggcgcatcgacttcgtgcgcgcgcgcaacgtgcgcgtgattggccgcctggaggatacgcacaagcagaagaaggagaagaaggagggcaagcaactcacgagcgtcgaggcggtagagagagtgctaacgtggcaacactccaagaaaatcggcccgggcttcgccaacttgggcaacacttgctacctcaactcggtgttgcagtgtctcacgtacacgccgtgcttcgcccagtacctgctggataaggaggtgtttgcgtccttcaacggcggaatgttgccggcaagtggcaaaaacggcaacaagttcggcaaaaacgggtttaacacctccggcggcggcaacgggttttgcagtgtgcgcgccatgtcgcgtctgttgcagtccgtgcacggcaacaacgcggccaaggtgttgcagcccaaggagctggtcatgaacgtgcgccacatctccaagagcttccgcatcggccggcaggaggattcgcacgagtttttccgcctgttgctggactcgatgcagcgctcgtgcctgcggaaggccaacatcaagagcgaaacgcactcggccgcctccaccacgttcgtgcaccgtatcttcggcggcatgttgaagaattaccttaaatgcgccaagtgcgggtacgtttccgagcggttcgacgactttttggacctgtcgctcgagattgcccatggtgttaacactgtcaaaggtgcacttaaccactttacggcaatcgagacgctggacgatcgcaacgcctggaaatgcacgagttgcggcaaacccagccgcgctgagaagggactcaccattgccgagtgtcccaacgtgctcatgatccagctaaagaggttcgacctcatgttcggcaaaattaagagacacatcgaattccctcgcatgctggacattgcctcgggcatgagcaaaaactgcgaagaccgtcgacgcggccgcaccaagtacgaattgcacgcggttttagtgcacgccgggttttccacggactgtggtcactattacgcgttcgtcaagggctcgtcgggccagtggtacgagatgaacgacgacaccgtcaggtgggtgagtattgacatggtgttgcagcagaaggcctacatgctgttttactcgcgggtgttgcctctgtccgagcgtcccaagcctaaaaatgaggagcaggaggtgaaggcaaaagccaaggagttggtggaaaaggccaaaaaggaggaggtacccgaaaaggttgcgactgctgttgctaagccgttgctggccaagacgaaggagctggatatgaacgggttccttgccagtctcaagacgacggtcacctctggaggtgatggagataagccattagtagtggtgccggcaaagaccggcaagcgcagcaagacggtggtgacgtttaaggttacgaccaagtcgaagccggtggcgaatgggatgccggttgtcgaagcgcgccaccggatgaagcgcgcattaacgcctagcttcggtggtcgcgtgggccggctgtaccggtttggaccggcatcgtacaagtcgtacaagtcttgtccgcgtctcgtcatgacccggtcggtgacggaagtgtcggtggagtctgctggcactgagccggcagctgctaagtctgcgccggcggagaagaccaacggagtcaccaaggtgccgttcgacccgcggcagctgaagaaaatcggcgtgcgcaacgcggcgttgttcggccgtgaggtggacaagtgggcaggcgagacggacgtcgaatcctcggagaccacgagtgccggcagtgacgctgccgacaatgcgctggcggccaagcatgaccgcgtgctgaacgcgctcaagcaggaggagtggaagcaccgcaacgccgggcgccaggactactgggacgagaccctggacatgggcaaggtcaagaaggtgaaaaagcgcaaggagttcgtcccgaacgaaggccgcaagaacgccttccagacggcgctcgtgaagaagaagaaagaggccaagcgccagcgcacggcatgagccctaccggcagtagtcgcactagagaaaacagtgaggagagatgtctcgacctccgattcatgcacattaccaaaaccttgtccaaaactgaagtgccccaaagttgaagtgtcggtcagtttcgactcgactcgacgagtccggcgtggcagatctagtgagcctattgaaggggtgcctcgtgcagtctccggtgcctttaaccatggacagtgacgagcaacaagctgccgctgacgaggagcagcagcctgaggtgttttctgatgagccagcgacttgcgacgaggccgaggaccctgcaacacccgaaatgaacgacaagacgaatgactctggagagccgtcgtccgtgtcagacatggccatggccgagttcctgcgcgcgtcgtccgagcagctcgaaggcagcgagttctcgctgctcatggtgctgcagcccgacaacgtgcggcatcgcgtgactgtgacggccgagacgacgatcgggatgctgcgcaagatgctctgcgccgacctgcagctcaacgcggagctcgtgagcttcccagatcttcgaggaccacgtgaagcggaccagaatgaagacgagttgcctctctcagcgtacggtttgcctagtggcagtgcagagtgcaccctcgaagcgtacgtcgcgagaccgcccacaacgagcgactacgtcatgccagagcgcatacacgtgcaggtctacaacggcgagtagagttgaggatgctgcgggttagtggtgactgtgaagctgacgttgtcatttcatgctttgatgcagaggagactgatagcacgagtatcattactgtggagatcgagaagttcacaggccataagccctatctcggaggctttagacaccgcaaaacgcagcagcatttccatcacgcatctactcaggtacgcgaagaatccttgagatccttatagttggttgggaggctaacatctcgtatattatcagactatcctatcgcgcgcaagacgcaacatggggccaccgcgattccaccgtgagacgcagacgcaggagcttgtgactcgttcattgcagacgcaccgcgagtcgggcacgcagatgtctcgacgtgatctcaagctggacgaatccttcgaccgtcacgtcactgcgcggccgtacttcgactcctatcagctcgacagtttgcgtgaagactcggtgctgctcatgcagcgtctgtggcgcgggtttcgcgcgcgattgtacgtcttcaacatccgcgagcagcgtcgtcgcgtgagtaaactggcggagatcgaggcacaggagaacgaagccgaagacgtgaaccgccagcggcgtgaagtcaaccgacggatgcatcccaacaccgtcagtgactttgaagtgctatataacgagctggacaagtggagacaggtggagtgtcggaaggtccgagagcagagagaactggatccgaccgagagacagcgcgcgcttgatgcgattttggccaaggagaccaagctgctgcagaccatcgaccgcctcaagctcacagccaccgacgccaaccgcaagcagcgcatcgaagccatgttgcagttcatggcgcatcccaagcagtggcagatgagcgacggcggcatcaaggaggtgcacacgcccttcactgtgcgggctaaagagctcatggatctgtaccacggactgcgcacgcccctgagctccgtcgatgagcgcctggacatgctgctgcacatcaagtggacggtgcaggagttcgactgcgcgctcacccgcgagctcgtggagctcatcgatcgcgaggcggatatgctgagtcgtggacggaaggagaagagcctcgagggactacgcaagaggctgacaaatctgttcctgcagttcatcgagacgccagagttcaatccagaagccgccgcgctcaagcacgcccgcgcttaatctacacaactcggagattttttttattccacaggttaaatgtgttcaccgtaggatcgcgctcactaccaatgctttatttgtgttggattttgtaagaaggaagcacagaagacacttcagacagtgcatgatgcgctttccatctttcgttccaagcttggtcgtcgctgggtagtgcagttgaagaccccgggattgtccacaactggtgcttcaacaacaagatcaccaacgccaaaacatatccagaaaggagtcgatgtttcggagtactttgtcatccccaacgacgggaaggcattcgcggcacaagagacgcacagccgtgaacactgggaagtcaggccactcacttgtgtccacacggaagatccgcgcgtcggcaggaggggcccgataaggcattggagctggatccatcttgtgtgcttgctcaactgtcgtcggtttggcgtttgctggccccaaccttttgtgcttatttttgagattttagagtttgggtcgttgacgttatccgcagcgtacaagacttccgacggcagtctgcgcttgctccagtacctggctgctcacgaatccgagacaaagcccatgtctctccgccggtgggtgctaacgctgtggctggccaagccgcggcacgtggagatttgaggacattgaaatggatcgtgcagagttatttacctggtgaattcctggtgaatgttgtagctgaagctgcggctcacggcccattgagcgtattggagtggttatggggaaactatcgtgagaattgctactggagacgttatgaatttgtccaggctgtacttttcaacgatcagagtgtcggggagtggctattgcaccgcgttgtgatgcgcgatggggacgaggtttcaaaggttcttaagctggcattatcgctgaagtgtgtgcagttgctgtaccaaaagtatcatcctgatgtcgcggaagcctttcgtgacgcgttgttatacggccgctgggaagttgtgcgctggtttatggagaccgtgaccgacgaagaatacttggccaatgcccatcaatataacgaggctttcgagagcccagcgcggttcggtgctctggatttactcaaggaattgcatgatcggggcctagtgcgagtgtctaaacgcacgattgagattgccgctgagaacggccgtttgaatgtcgtcaagtggcttattgaagagaaagaagtggcaagtattggccgcgcgttccagcgagctgcagacggcggacacctggatgtactaaaatatttgcacgcagagagagaagattcttgccgcgactcgagtttgaatgcagctgctagtacggggtcgctcgagacggtccagtggcttcgggagaacacgcgagcccactgttcagtcgttgccatggattgggctgctattgacgggcaccttgagatggtgcaatgactgcacgccaattatcccacggaagggtgtactatgtcagcaaagcgcatggctgctgcacgcggtcaccttgatgtgctaaagtggctacatgaacatggagacgagagcgaattccatgcttgtagccatgaacaaatcaatttccagcgagtggtggatactgctgctgcggacggctactttgatgtggtgcagtggttccacgataactgcgacgtgagttgcacgggttcggtcattgatggagccgcaaagaacggctatcttgacgttgtcaagtggctgcacgagcactgtcgagaggggtgcacgacaagaatggggtcacaaatgtgggagatgaattcggtcaagctgcttcccaagcacatctggatgtgctaaagtatggaatagggaggattgccattctgtgaacttagatcatgctgtttggcagggctctctcgagacggtgcagtggcttcatgagaataccgatgctcactgtccgccgcaacctgtggacatcttgaaatagtggaatggcttcacagcaaccgtaacgaagggtgcaccactttggcaatgcattgggcagccttgcatggttatatggaggtggtcgagtggcttcacgagaaccggaaagagggctgtcgacgagataccctgaaagattgtgtcattcgtggtaaacttgacatagtcaagtggctgtatactaacaaaagggaagtgtcagaccttgatggagttatcgatcacgctgctggattcggtcacttggaacttgtgcggtggtttcacgaaaacaccaacgaacgatgcactagagccgcgatgtgtagagctgctgggaatgggcatctgagtgttgtaaagtggctacacgagcaccggcgtgaaggctgtacaacagatgcaatggatactgcagccatgcgcggacacctggaagtggtgaaatggctacatgcgaatcgagatgaaggctgcactaccgaagctatggatggagcagtgaggggaaaccacttgggtcttgtgaggtggctgtgccgccatcgttcagaagggtgtacgacttctgcgatcaaagtggctcttcaaggaacaatgtgcttagagaccgctgacttgctcttctctaggttcccagagtgccgaggattcagtttgagagacccggttacgatttcgcgagttgagcttgtggagtggctgcgcgcgcatgcaacgcattcgctaaacggacgaactcttcttaccagtcgctggaattcgtacgtctggagtggcttcagctgcatcagtggcgagttatccggcaggataatcggggcttcttgtggggggagtagaggtacagccctaacattaattactacagcgggatgactcggcgattctccggccccttagctctaacgttcaagtttgctttttggaatgcagtgagtattagaaaatattgtaggtgtccgctgaacgatcgcaacttcaactttggccatacaattatctgtattatgttggtgcaaagccagacgccgacgatgtcgatgctgcagcttgccatggggatgcctccagagttggtgctatggctctcgggctatcttcttgccaaacgctatgtattatgcaactcctgaggactagaacattgtgctgtgctcatcctggaacttccagggccctgttgacacacggtatacgccatagctcgcatgccaaagcagcccagcgtgggcctcgctccaattagaagaccaacacacgcctgccgagcgtagtcttgcatatcatgtacaccaaagctacatctcagttgggtctgggatccgatagcccagcatcgtagggcggtcgatgtgcagaggtggctaccggttgcgacagatgcaaccagccctcgctcaatgatatgatatcactgcaatacttcgacgaacaccaatatgaacgcggtctacagtacaacagtaaaagttcaacttttgcagtactcactcgctgcagtgggaaatgaacggatacatccaagtatgtacaccttgcgctgctctatacagaacggaaagcaaacactgtaattgattttttgtatgacggaactacactaaacgagtcgacagtgttcacaaaaactaaccaaacgcaagcagcggaagcagtcagtgagtcagtgaatgaatgaatgagtgtaccggcatcaaccgattcattccgaacgtagctggcggtacgccttctgggacgtagcatcagtgccggcctcggtcgcgccgccggcagtgccggtcttggtcgtgccggtggtcgtgctggtgcccgtgccggttcctgccgtcttggttgtgccggtggtcgtggcgctggttgtagcactggctgtagcgctagcactagcacccgttttggcgctcgtgccgccggtggttgtggtagtaatagtagctgcagtgctggcagctcctcccatacttgcgccggatttgccaccaacgttagcggttccgcccacgccggcactggcactggtgcctccattgccagcggcagctccgccgacagtacctccattgccggtcacgccgacaccggcaccgacactggcactcgtgcctgctttaccgccaacgccaacgccgacgccggcagtgcctccaacgctcgcgccagcgttgagccccgcggtgatgagtccaaacgtctgggcgacctcttgctcggcgtgcgcgttgcccatgagagccacgatggcgaagcacagggcgatgatcttggtgctgttgaacatggttgagttgttgggttgatggaggtcgtggaatgcacggaacggagggtcgcttgttggtgctggtgagtgagtgagtgagtgagccctagtgaggagaatcggtaatgcctatggtgaagcccgacttggcgggcatgacacgagcaccctcttgacttggagcaaccgatgaagccaaaaagatcggcactgcacgagcctgctgccagcctcgaccgtcaggatgaccagctttgcgatggataccgaagttgctgtgcctcttcgccctccatacgagcgctcgtcaaagcacaatgagtccatctgcagggtggttcggactgttgtttggttgctagtaaacaataagcgcggatgtctgcaagatgttgatgcagtcagcaccgccgacaggtggctggccccaggtgtccgctgaacgatcgcaacttcaactttggccatacatttatcagtattatgttggtgcaaggccgacaccgacgatgtcgatgcgatgatacagtttgcaatggggtggtaagaatgccttcagcgctggtgctatggccctcgggctatcttcttgccaaacgctacgtattatgctccaactcttgaggacaataacttattgttcatcctgttccaggcccctggtgacgctcagcccccacgggggatacgcgatagactaggccagatcgcctgccgaatcagcgggggtatcgcttccatcatggacggtaaatctgcgggacggctcgaccagattctacatacatgtttgtactaaatttcagagtttcgtcgtgcagtgcgcgactttgtttagtaaggagataacatagtggttccagaaaatgaatatgtttttcgggactgttatgttttggaatcctgcatactaatacaacgtagtaagtagtagcataagtatcgtgcacgcttaccagttgtacatcgtattgaacccgttggggtgagtcttgtccaggtaggtactgtatgcaacccgcgcttgcctttggggagtcgagatatcgagctttctccaagcgtcagcattgtacccgagaattttttcgggcacagcgccaggcctgatacccctgttaaaccacagctcgtagagcgtgttctgcaacctcgtagcagtcttcttggtccccttaactgttgttgccgtttggagcaacaccgcgaggttcgcctcgcccccaaattgctcccgaagttttacgataactgcgatctttgggcttgccttggacatggcgacatatttcatccaaaccttgaaatcagggttgctgaggagcttgtcccaggcatcatcgagcttgaggaacttaaatgcttcgtcagtgcttcggccgctcttcactaagtcttccagcttcttttggctcgaagacttgaaaaaagtcgcaatgctctccacaccagggatggctcttgcctcatcaaacgtagcggcgctggtacccgttcgtaggagtctagtcgccgcgagggaggaaaattcaggcgtcgtggagtctaccccgtcgatggcagttgccaagataacagcaaccgccagaagcacagcgaagtggagctgcatgatcactttcagggcggtggggctgtgcgggatggggcgcgaattggaaagtgatgagaaattggctcagataaaggttcagttgattagtaagcttttaaatttgaacttccagtactgtacacttgatgggcgggatacgtacggagtttaatgtatctaggctcgatagtatctagtcgataccactggttcacacagaggttttccggcgaacagccgggagctgcttcaggagctgttcaggatttgaaggcagtttctgattgtttaatgtatgcactgcgtacggtatattgacgagacctcggtatgatcagcaaatgaaaaaaaagagcgtagttgcaggttctgtacctcaatggcccggttatgtgcttcccactcagtggctcttcagcaaacgcttggaacctgaaacccggaagatagttcgcggttccagggaaaattgacttcagcatgctcattttttacctggaaccgcgaaaaatgttccaagattacctcgttttagtggcaaagtttcaggcagccctgaagcttggaactttttaatcgaatagaaggtcgtgtgggccacaccaccaaggatggcggagcctgtgcatgcagcggagagagctcagctcgactgagggcgcgctctactgcaataacaccaccacgaactctgcgtgcgcgcacagggacttaagcacccgcgtgccatcgagagctctcgagcacggccaccacacgcccctcccgccgccgcgtgatctctcgcgtacatgccgtcgtgcgcacgcgatcaggcagcccgccacgtgcgctgcttggcgctgcttggcgtaggcaatccttacttggcagtgaccactaggcagtgggaacgtctctctccctctctcctctctcgctgctggcgttcatgccgcacgccagcgctcgcgtggccaacgaatgcgtgggaaagtggaaaaaaatgagggagggcactgcaaaattttatgtacagaatgaatgttgtaaaagtgtgcggttccaggtgaatttacctgaagtgcctcgaaaaactgcatcttggaactttttttccaggttcaggttccaaatttgctgaagagggccagtgcctttatcaacgctctttttttttcatttgctgatcataccgaggtctcgttaatataccgtacgcagtgcatacattcattaaacaatcagaaactgccttcaaatcctgaacagctcctggagcagctcccggctgttcgccggaaaacctctgtgtgaaccagtggtatcgagcctagatagtacagataccacccagaaactgcaaaatgtaaaaattgatacccttgtggaatcatgatatcaagggacatcatcgcaggagggagcgcccgtaccgccactgtgttgtctacacattccattttcatttgaatcatccagccaaaagcatggcgcactttttccacagacaaactcaaggcagcactgagcacagtacgcccacctccagaagcgttctaagggcacccagaagcgtaccaagggtgtgtggctagccatccagcaaaggtgcgatgttattacggagtatcaccctctctcttagaagtaaaaatgaagtttgaggaaatagtggtagtaacgcacctcaatcacttatctcctcagattatataatttcctgtaggaactcggatgtaccactctttgcagtttagtagaaacattaaactccgtacgtatcccgcccatcaagtgtactggaagttcaaatttataagcttactaatcatctgaacctttatctgagccaatttctcatcactttccaattcgcgccccatcccgcacagccccaccgtacctaatggcactgagtaaggtgattactgaattattaatattattattaggtacttagctacagcaaactgttggggccgcgtcgaacaagatgacgcttacgaaccatttggagtttccccttcgagataatcgatgcgagttataagttgacaaatcagatttcggacatgatcggaaaattgaaagtgaaagtcacttgtagaaagccttacacgttaatttaactacatttgttatgagctttccgattatgtataataagcaaaaattgacaaagtagtgccaaggtgatacgtcccagagaaaaccctggatttcgggatcgaaaaagaagacacacttgatgggcgggatacgtacggagtttaactctagtacaggtggccactagcaaacactttcatgcacataagttgggcagaatgatccggctagaagcacaataaaagtgcgcaataagtacaagagacgttcatcgttgacaataatctgaccaatggtcagtttatttcacacggcacaataatctgaccaaaagacagtaagtaaataaattctaaccagttcgactgcgtttgtcgagcgccttagcggcattaaatcagctttggccatcagtcgaggtcagctagacacaaggcgttgatgcttgagcggaagcatacctgctcgcaccccgctgaaaaggaagagtaaaaaaacgatatagtaagttcctcagggatttctagatggcttaaatcggaccctgctcgcatttctctaagcgaataagttaagctgggcgttctggagtcgctgggcgttctggggtcgtgcttgaccagtattccaacgaagaagaatataaattctattaacgatagtagttctatacccaaactctgagtatttatttattattaaatatgtgagtagttacgatatttttgcgtttcgaacaacacactgctgctactgagtgctggtatcccttcccacacgtacccgagggaggagagcggctacaatatcgcgtaacctatggaacgtctggcaaacacattttactcataacttcttgaaatatatacgaatgtttattcttaccttgcgaccacaactgtgtatatcagtcgtgcatatcgtactcctagttttcaattacatgtacggcaccttgcagtatcacagctgatactacaaggcattgtatgcgcgcggttagtacactctcgttacatgttgccgcggttaacgtgttgattatagcactagccgagcgccgccgctacgcggcggggaatttttggttgcttagcgcttcgctcgctatgctcgctccgctattgaaacaggctgcctacgcttagctacggcagtagtggacccgttctgctcgccttgtcggctcgctgcactacttttaggaagcctcccagtcgccgtcctaggttaataatgcaggttagtgcgggccctattgggggcccgcaacgcactatgaggtgaccggctgggggctgccttcgctgcgctcggcagctactcgtacttggtggaattcttacttagtgaataagcgtgacgattttgattcggacggacggacagcgccttgctccaattgatttttagggctagccgagcgccgccgctacgcggcggaaggttttgtggttagtcgcagtagtaagggccgcccacctccgctttgctccggtgggcttttttaaagttcaaatggtattcatttcgattgtgtacatgtaaaattgtttataggtttgaagtactatcagtagatggtaatagctattccaacgtcagtgaactatgagtagatgcatgttgcagggtaaaacattctctattgtacggtcctgtgctcccgtcgcaactgtttaacccgaattacaaagtatccgcacagtacatatctcacaatctgcgtttactgtgagtttagtagaaatgaacatgagcaatatgccagggtagggtagatcgatctggtgttggtatcttatgtaagtcaaaatatgtcttacgtgttgtttattcagtttatcatcccaccgtagctctctgtttttagttcgtaggctataataccttcattctacactggactataagccccagcaacaatcaaagtatgggcttcgctcttcctctgcctagcattacattaagtgcttgtgatcttatataaataccgagtatacatcatcgttttagtattttgtgtgttccgccaaaacgtagctgcgggctgcgctaactactgcgtggtctacttcaaaattcattgttttagacgtggctatggtttattattctactacgcggcgaacattaccattttagtgtaccacctgcattacagtaggtaagataatatcttacctctatattatagagttcggactcgtaactatatagttataaagtcacgtttgccctttgttaattcggtttcctgcgtgtatatccgccccataacacggttagaaaaggaatcccagcgtaagctataataaaaggcttccactcagtgaatattatctactaccccactaacgcatcctcctaacgctacacattgtacattaaagatatacgaaacgcgtttaagcaagtgtagctaaatatccccccaagatgagcgcagagcgccgctgtagctataatgtatccatccctaaagtattacagtaaacgtatgctgctcatgttagtaataggggtagtcaatgcctgcagcagcaactatttttttttctcactcagacacgacaaatgtttttttaccaatcacaagctgaatgcgttgaccaccccattcactgtccgcagcaacagatcaagattttccgtcccccctcggcttcaaacgccccagcctacgcgcttgtcctctgggatgctgggaagcgtacgctggaatgcccggagcgccagcaagaggaaggtggtggcctctgcctccttcaggttgagtgtgagaaggcaacagcgtgttcatcctactgcaatcggcgtggtaggtgttgatcttagcatgaaactccagtcggcgtctatccgagttgtagagttgctgaggtcgcgcgtgagcacgaaggaggcccacctgttgttgatggtcaaggtgaggagactgagcgtgttgagttttgttgggggaggcgcttgttgctcggcctgccgatgcgaaagtagggctatgttagcggagcgaactgccgtccgctcactactctcagcgccttccaacacgcagcgattagtggatgcagctttagacacagtcctaggctgcttgctaaggaagactcgagtgtagtatagatacatagctcgtggaagggctcgtgttctctccgtccctcgacatacactgtgcattattacatgatcgcgctggagcaacgcttgctggacaccaaggcatccgactgacacaagtaggcttactagattgaccttccgagtactctgctcgcagcgcaagccccaagggcggagtcttctctcgcgcgacgaccatgctaccgtaccgttgatgctcagatcttggcgccagaaaaaaaaacgagctgctgctgcggctcgaccggaacgactttttgttccggtcgccgatttttttcctggccaatcacagccccggaaaaaatccgacttgctgcggcggaaaaaagtgagctgttgctacggacattgactacccctaataatctcgtgcacgccttccgctacgtttactcgcactgcgatcacttacaacgttgatgctatcgcttactacgtgctgctaccacgtccatatcgctttctacgtgctgctagcgcttaaatatgccgtcctatcgctgcctacgtgctgctataactatctaccgaatttgttttgtagagggatacacccacgtataggatacaggatagtattagccaatcacaattgtgtcttcagattgacagggcttgacttgttgagggatacaccagtttcaagccagtaatttttgcactctcggccgctcagcgcgcgatcatttctgcaacggcgcgggcgccaccaagtcaccctcgcctgtctggaggtcaaggcaggtggaaaacgacgcgggccctaccattttacacagctgcaatgaagaaggctatggtcgagcacctgagactacactgcaatgtttgtttcgctgaagatacgttctttccgggtccacctacagaaaagtatcaagggggaagagtggtggtgggggtgcttctgtcggcggcaggaacaaactcaaagcttgctctattgaacttcgatctcaagttggggtggtggtggcgaacaagctaataagttgggctgtgtcggcagccgcattggtgagattcggccttgagagacttgaggtagagtgctcagtttagtaattttgataaatacatctgggcgtctggtgccgattcgttttttgagcaaaatcgggcgtctggtattttttagctccggtagggtgtatccctctacaaaacaaattcggtatacgcttctatagcttactatgtgtttgtattgagccaacattgctattttactacagtaagtagcatggcaggtccacctattgctacagtagctaagggattgaaagtaagaagttcttaccccgtaactatgagttgcgctatgctaattccgttccctgcatgtatatcggtccaataacatggttagagaaggaagttctactataataaaaagctccagctcagccgaacaccatgctgtgcaccacaccgtgcacactacggtcacactgcttgccgctatcgtcgaactggtgctcctcccgacccaagagcacgggttgcctacaggccatccccgaccagaagatcgtccgcgatcttcccatcgtcaagcaggtcttcgaactccttggccgacagccactccttcgccgtaggtcccccaggccgaactccgaactcgacctgatactgctcctcgtatctgcctgctctgttccgcacttttcgtcgtccacactcccggaccatgcctggtcctgcggtgtccaacaggtcgtgcatagggcgcgcccatcgcgctagccctcgccctcgcagtgcgcgcagcgccacctccagcatcaccaccgccgggatcaatacgcgcaccatctcgtgctgcctgctcaccgtcggttcctccgcctggggcttggtcgtcactgcgtccctcttcgagcctgtcgtgcgctgcctcgttggtgttgccagcgcgtgatcctcttgtcggttcgtgcactgtggggttgcgtagcgcttgaaaccccacgatccgcgtctgcacccgcttcctcggcgtctgtcgccgcttgtccgtcacgacgagtgctccgccgagctgcccgggcttcacgggcctcggcttcgacccgtcgattttttttgctgctcttcgacaccacccgtgctccgctgtgcgctcgctttccgcttgcgagtcgccttctgctcgctcacgcctctctgactgtgatcgcctcccactgtaccaccagcagcggctctcatattacggggctccgttgcagcgcccgctattcctggttgtctcgattctggacctgatcctggcgttggcgtgccagtccccgaagctgtacgccgttcttgtctagcgccacccatctcactcgctcactggcccacttgccgctgctgtttgcacttcagatgctctccgtccttgtgctgcaccttgctcatgcccgacggtgcgaagcagagtcgagacgctgcagcgcatggctccgcgacgagctgtcggccgcagacgcgcgtaaaacgcgatcgcctgctgaatggatcgagggcgccacgagtccccacagttggccgtgcggttgcacagcgtctgcgccgctcggaagtgttcgtgcgcagtttccaggtcctcttgctaaacgaagtgctcactcatctcgtactcggccatcgcttccatgtgaacgtcgttcagagctcgacagcgtattagtagctggtcaagatcagcgtgcgcaatctcgggctcttccatgagccgaagcgttttagccacatgcagacgagctcgaagctcgtactcatggtccccgacgtgaagagcgccttggagagcatctcggaatgtcttcaaggcctcattttgacctgagcttcgctgcagcaaagctgttgcgaaggcttcagcgcactgcaactccagccgtgaccaagcagcagggtcagttccgctctcacggagaatttttgccaggtcgaagcccatttcggcgtatgccaagctgtgccccatggcagtgcatcgcctccagctccccgatgcttgaagcaaacgtgctagcatcacaagcacatcgtttgacaagtcagtaagtggcgatgtagaaggcgacgacgacgcgaggcgaacgattggagcccacgtgcacacaatccacttccttgccgtgcgattctggaccagcgtctgcggcgatgacgaagccgtttgagtgagcttctctagagttctggcggctgcgtcgtccctcatgtcgagtccaagcactgagcacgcgacgctgctttggagcaataacgctagcgcagcaaatgcagcctgaagtgccgcgtccagttgacgcacctcgttaggctgcgcgcagcggtggtgaacgttttggtgcatgagtcgctcgagcttttccagtcagggagaattggcagcttcttcgagtgtttgaaagtgcggcgccacatgatgccagaacgagctctgctccgctggggtttcaactgacagcaatggagccactgcagacgccttcgtaacacgctgctcaggttggtcgttgttgttcccgtcttcctcctgttcaacatcagcagcgccggcgatactgacactatttgatgtcggaaaagccgccgaggtgaggcgcagcttgggcaagagctctgcagtgtcagcgcgagcttccacgtccagttgctcagccaaactcgtgatcgcatagcttcccggtagtgctgttgccgccagtgctgcaaatgcgcgagcgtgtgcaagctcccccacgctacgcgagcaattcgccgacagcaaatgagcttcagcgatcgttgcattgtttgaggaaagtgccgctgcagcctgagcgtcttgaagcgcttgcctaacagcctccagcatcggtgctggctggttcgcctcatcgcggacagagctcgacgacggaccggaggctagaatatcaaggggcaccgtcgtggtgacgtcgtagtcgacaaaagccaacagtgctgctgcgcggcggcagtacagagtggctaggctctctgtctcggcattcgctgctgccacaccatcatcgtcgtcgtgattgttgcttgcagtgctcagtgttgcagcctggagctgctgtgtgagttgctgcagtaagtggaggtcggcaagcagcgtcggctgcttcacaggcagcaaaaggtgcggttcctcctccttggctttgcttgaagtcgacgcggcttcctcctgcgggttgtcaaggccgtccttttgcttgaaaaggatctcgaagatggacgggtccgtcacagtagctgcgcgaatcgatgccgacattttgtagctgttcgagctggtggttgagcaggaatttgcaatatggagacaaagcgatggggctcttgcggcatgagaaggatgcaagcagcaagggatcatgctcgcagcaataaatagacgtcatgggatgaaacactgctggaaggcacactgatgcgaatgggaagctgttgtctaaagaaagccacacctcgggtgcaaacccgagcgcactacaccaaaaattgaagaatgggatagcccgccgccaggctatctacactccagtctcagttagtcctgtcaaccttaccttactcaccttcaacctctcgcgggttaaggtaaggttggtctcacctcaccaacctcgctaacctcccacatacaaaactccatataaaaaattatatgagcttacacgaacacacaaacgcctggacaccaacacccgtgaacaccaagacgtcgacgtgcacgtgaacgccgacgcgctcgttgctgccgactcgctgtagaaagccgatgtgctcgaggacgtcgcgatgctcaaggacgtcgacctgctgacggacgccgaagtgctcgagaaggcgacacgctcgtggacgccaacgcgctcgtggacatcgagatggtcaaggacgtggacgtgctgaaggacgcggaagcgctcgaggacgccgaagtgctcgagaacgccgacacgatcgtggacgccaacgcgctcgtggacgtcgagatgctcaaggacgccgacgcgctcgtgatgaacttgatgaacgtaataaagcctttgtcttcaaccaagagaagcgggcgaaaatgggctgctatccaacgcgcaagaagcacgtacacctccttctgctgctcggggctaacttcacgaagctgtcgggattgagcttcgggctgcggctcaaggctattctcatccgcatcgtcctctttgccgtaatttgcgagcgctgctgcgtggtagttgctcatgtgcctctcaacaccgctgtttcccttgccgaatcgaaccgttcgtttgcaccttgtgcaatatgcatacgcagtgtgctcgttcttcaggtttttatcatcgatattccagaaccggccagtgttcaggctttcgaattttaatttactcatgccaacctgtttgtgaggcggtactgccattaccgtttcgtagactggggtctgccatagtggtggaggagctgttagcgtcgtagcagtcgaattaccgctagcaccgacgtccaccgctcgttgcgcaggcgtcatggcgaccaaagtacctctatcaccgccgtccgaagcttgttgcgcaggcgttgcgtcaaccctgggtaccgagcgctgctggacctcttgaacctgcgactcactggcggcatccgaatcggaagagaacacggtgtctaaccttcggcttctctttgtttggcgcgtgtcggtagaaacagctcagcgaaaatcacatcctgtagcgttccaactctcacgggcgatagtgtgtggactgcgattttgagggacagatgccatcggcgtgtgcgaggcgctattcagcacttcgtcaggggggcggtgctcgttcaccgcgcaaattcggctgtagagatcgctcctggtgaccagttctggattagacgtccgagcgaggtctgcgagccagcttaacccctctaatcccgtattctgtatcctacagaataagcattgtcacaggacataatatctagcaaacttgtcctctctttcgaacttcgcatatggatgtttgtatagccggtattgtgcacatcttcctgttagattagcgatgggaaaatagacggggtttattccgcggtaatagacggacgagtataaaccaccaacaggtttgaaaattcgggtggaagcctaaaaccgccgcgtgtcagccactcgtactttccttcattccgaaactgcgctgttcaagacgtcgcaatgcaagctttgttggggcccgtcgagcgcgcccaagtggctaaggaccatggccgaagacgatcatgatgagcgccattgtgatctaaaggcaagcgagagcgtgtactttgctctgtaacattgtactagtggtatattgattctacgttgcgatgttgattaccagacctggtgatccgacccagacgacgctatgagctctcgcgtgtggcccgattggcagatcgattgcggagtcagcgcacaacctcatcggttcctacgaagccggctacagccgggtctaccgctatattgtagctgatgcagtggctactcaagaggctacagaagaagcgctcctcatggtgtggctacaccggagactacagaagaagcggtagatgctacgacggaggctaccgatgaaagcggcaggaatgaagcggcagtgccggaggctacagagcaaggcggaggctgccaaaacggcgaagatgacccacggctggcacgaacattgaagagcgtgcgcatgtaaaggaagaagtagacgttggcatgaatatcatatattgtcctgtttcgtacaagaggaaccgtgtgtagtgcgtgtcattacgggctattgagcatgcaagctccctggtgttgttagagagacaatcgtaacaagcttgttaggtgggctaaagaaatctaatgatgcgctaatgtcaagcacaaggaagaattcgcccagttcctcctcactacgtcagttaggaactgggcgatttcttcctccgcgtttatcgcgacgtgccgaagatgggtggctggagccgaagtatgctgccttagcagccttgcaaggtattaccatgtagcaggttttgagcgtgctctacgctcggcacgaccaatagaagctcgccatttcggcatatggtggatacattgagcatgttttgttcactttcgtagctgttctgtgcacaatgtacccagcgcttgaccgcaagatgcgaaagggcttccaacagctaatctttgacaggttttgaagtatactgtaatcaagtctaatgcttattcggtaggatacagaataaggtttggggctagaagggttaaagtgcatgaacgccgcgtactgcgtacagtacgcggcacctttaaagatgggctatttatgcaaagcatgatagttacgcaggttaggccgagagtcggggaagttgggaggtctgaaggtgggttgaggttacggaggtaaaggtaaggtttgggaagctaaggttgacaggactaacacccacaccaagtcgccgactttgaaatgcgcgtcccgccgcacgcgtaggttgtaatacttctcgcgtcgcctctgatcccgctgcaaagccaccttggctatcgcagccgctcgctccatctgccgtaccagcttcctgtgatactctgcccatcgacccacttgcgttacaccactcgcccttaatagctcgtttggcgtccgcaggcgccgacccatcattaactcattgggtgagtatcccgtcgtgccatgacgcgcgccgttgtacgcgtacgctgcgcatggaacccactggtcccagtcattctggttctcacagacatacatcgataccatgtccttccacaccttgtggaagcgctccaccaggccaagcagcatcggccgatacggtacgggcgttgcttgctgagcttgcagcgctcgcaccagcttcttgaccacttcgccattcaactccggggcaccatccatgaccaactccctcatcgagccgtagatcagcacgacccgctccatcagaaacttagcgacaacgtccgccgtgtgcgctggcgtcgccaccgctactgcatatcggctcgcgtagttcacagctgcgatcacatacctgttgccactggccgtcatgggcaacggaccagcaacagcaagtgcccattgatctccaaccgccccgatgccttgactacgaagcggcgggatcactgcctttggccgcgtcttcctcgtgccgcagttcctgcagctcctcaccagtacttcacttggccccgcagatctgtccaccagtacgtcctcgacacccgtgccatcgtctggggcgtcctcaagtgccctgagtagattgagccatgcgcttcacgcagcgccttggccctcagagtcgaagataacaccacacgccgtcctccgatcatcagttccagtgccgattcctccagctgtcacctgtgtcgaagacgttggctgcgcacccccagccgccgctcgcacgcgttgcacggtcacagcgggcgtgtcgtatccgctaacgacagaccccaagccgccactacactgcattccaccaacgaccggtgctgctgtcattcctggagcgctgggtgcggccaccgcacggctgtcttgcgtcgcgatcgccgcagccaaccccacgccgtaaccctctccgtactcgccgaccacgtccaatgccaagttcactgctccgttgagtgtcgtcggccgttgcccacggaccatcgtcgcgctccacgcgttgctcatgccggccaagaacgcgtcgaccaaccactcttcgtcgaccgggttgctgaacgcgatctcgcgtaacttctgcgcttactccacgagcggctccccacgctgttgacgccgcatccgcagacgcgctacgacctccgggttggaccacttgaccatgtacctgtccttcatcaagcggctcaagttgccgaacgtctggtcctctcggctggtaaacgagtcttcgactgtgtcaaaccacagcaaggcctctccctcgaagctccccaccatctcgatgaagacttcgtgcttgcgccactccatcctcaagatcgatgcctgtcgacgcagctcgttcttcacggctttgagccacgccttgaccgtcaacttgggctcgtctagccccttgaacttcggcagtctcagcttcttctccttcttcgactcgcggtacatcaccatcggtgctggtgatgctgccgccggtgctgctggagctggtcgcgccggtggtgttggtggaaccggaggggctactccgatcatagtccccgctggtggacctcctctcgccgttgccgtactcgttcctgctgctaacgctggatgggggaggtggtggctgctgatctcctccgtcattgccaccgtccccgtcacccgcacctccatccgacgcgtcgaccatgaccacgccgtcatcgttgtcatcgccgtgcccaacccggggcgtgttccccgaggccacgcgcacgttcgccgacgccgcgaccaggtttcccctgtctccagccatcagcgtcgccgtccttggtgccagatggacttgcttcgccgcttcacgatgtgcatccgccgccgctacagcgcgtgctgctgccgctccaatcacggcagcacgccgctcagcacggtcgtcccgcgtatcgctcgccgataacatgcttctagctccttagactcagccactcaactctagaagacaaactaatgcaatccatactgtcagtctgtgaactctgtatccgtaacccgctgcggttctgtctgtccgtaaacttctccctcgccgtaagatgcaccgtcctctctgtactcggacgcgtacgatcctggttcggtccctcggtaacttagctcgccgtgtaggtctctgtacccacgcagcacagaaagccactgtaatcaccaccatgtgggcaatccggctgtggagaagcaggatccaagaatttgggacaaagggtgatcggcagaatgatggatccagactccgcgatggatccaccagactggcggatcgggccccgtaccaggtgttagagattgcaacggaagacaccacgaatacgaccggacgtcacgaatgtgtgcccaagcaacgccatgcctcgagacccaagatccaagagatgcagctgtcaagtggattggcgatccgatccaatccagatctgattctgattcggactcaggtggaagtgagcggtggatctaaggtcatggcgcagcgaaggtaatcaagcgacacgcaaggaaggtgaacaagctccatagagtcagtaggtacagatgggatgacaggatccataggaagataggactttgggatgggattggacttaagcataaatcagactcgaatttgccttatacatcgcaagtgccttcgccttcgcctggaaacgggaagtacattggccccacggcttagcaaggttctggtagtgaatctagcgttggttaagactggataataaattggccagttctacaaccttcctagtgacctacttgcaagtgcagatccccgatccacccggagttactacttggccgggtgcatcctcgactctcagcatctacggatcccgctataggaagcggcgagtacggcaaaggaagacctgcgaaggcaaaggaaaggaacaacaacaacccgcaggcaaccccacggccggatccagatccaggccgcccgatccaagtcgactaccactggattgggagtaactactgcgaacagagtgaagatttccgcgctgctccacccacatccccgcgtctcgcccagactgttctgtcttcaaggctcggacgcttcagcatacaccagaggagcagatccagccctaccgacgggtacacaaggtgaccagttcagcacacagatcacggatcatcgggggaccccctccgtaagtcggtgttcgggcgcagttggtaagttggattggcaatctcgcagattttgctgatcccgctacgccacaatggtgcgcgtgcccgaatcttctggtgactcgggatttcaccgtgagtcccaagaagaagtttgagtgaagaaggaacaaggggatcaagcgtcatcggagtcgggatcgacgacgacgctgctgaatgaaccaagatccacggatcggcagagtgcaaggaggacctctgtcggcggaaccgaggtggatccagacatggatctagaagataaacctcaacctcctccacaggtcccttcggggaccccggtggatcgcgacgcgagtcaagatccaccaacaaaacaaaccaaggctggcaaggatcggtatgcatttgctgattcaccagttaaaccggatgcctacttcttgtctcccgacaagaccaagtcgatgacacgagcgaagatgaaggccccggatctggatgacgatgatccaaaagcgtcatcccacgaagaatccgaggaggcaggctggagacgctaccacgagaagcagttatgtgacttcctggcttgggatcccatgatgcggcttcttggcgtgaagccgatcggagacctgcaggggcctgtggcactcccagcacccgccaagcgcgaagggatcctggccgagatggagcgactcatgcagctgctgaaggaggccggcctcgtagctggcgccttcgacgcgagagcgatctacgacgtcgatccaatccagatccacgcgacgacggacatgctgtccaacaggctgaaggagttggtaggtgagatccagctgaagacggatccagaagtcccggatccaagttcacctcaagctggatccacaggatgccgaacgtcgtcaccatacgtgtccaccgcggagcttgggtcggatacatcttcggagccgcggcgtatgtcgcttggaccctcgggagcctcgatgctacgcacccgagcccagatccaacgtgaagcaaggactcagtcccgatcccagccccgatccaagaagccatcaactgcttcggtggatccaacagctacggcatcaggatcgaacatatcgaccggcagacttgtgtcatactttcaggcagccatgggcaggttcttgaaggagcaaggcgggttgaccccgacacaggcgccggaggcgacgcagaaccccggatcccaggacgtggaaatggagtccactggttcgtccgatccagatcaacactgggagtacgatccagatgacatcgacttcccggtcccagatacagtggccaccaccgcgaccggatccacaggttcagccctgatccaacgagtccggatctcagcgctctcggatctgaaggagttctcagggaaggaccaggatgaggatcgggcgagagcatggatcagtaaggtgaagtctgcgttcctccgggaccaagctcctgacgaggagaagtgcttgaccttcgcggaccttctatccggatccgcgagaaactggtatcgccaactaccgcgatccacacgcaacaagtggtcggatctgctccgcagtttccaaacccagtactgtggattggggatctccgttgctcgccagtattaccacgcgcgcaagcgatccgatgagtccccactggattatctctaccgacttaatgtcgctggactccgcgcccgactcaagatcaaggatggtggatccaaggagaagcgcgagtacgtggatcacttcatcgaaactctgggtgatccggatctagcggatcggctgacattgctccgacggccggatgctgacgagctggaagaggtcctccgcgcactggatcgggcgaagaatcgacagaagaagcctgcgtatggatccagcaagtaccggcagaaggcccccgcgacgcccacaccggccactccggccaaacatgtgcgtgcgatccaggtccaacctgactcgggatccgagtctggatccagcgatggatctgactccgagtgcgacggttaccgcaggatctatctggcagcatcccaagaccacgcggagcatgcagaggaagagcagaagactctggatcggaaccctccagaccgtccacagcaggatccaccgtctcgcgactcccgatccaggacgcatgcggatggacccgaacgtagtcgctgcacgcactgtggatccaagcggcactcgcatcttggctgctggaaacgcttgacctgtgagaagtgcggcaagaagggtcatccaggtgaccactgccttttcctgtgccgtggatgtggtgaacttcatgacgtgggccgatgcccgatggaagagttctacaaccagatccgccagtggttcaatccagccaagcatgcggggatgctgccagagatggcggagaagatgttaaactaggacgctcgccgggttggaatccggtacgagccgagcgttctagatattgcatctatgcatttgtgaacaagacatcgacagatccagtttgcaaacgacaggatctacgcggtattacatgtgatcttcatgggaaacgtactgctgtggtctcaagtctccgacaagctgatgactactccagatccgacacgacagtggaaatggatttggatccggaggcacgtcagggatactggaagcagcaggatccagaccagtggtttaagcctgctgaaggtgaagacacggctggatccagatccaggcgtgttgctgcgaaccggcggaccacggattcacagtcttcgtatctcctacccggagaatcccgaggatactggaaacaacattcgccagggaaatggttccgtcaagccaagatccacggcaagatcaacaatgagaaagcgatcttactcctagatacaggtgccgaggtgtcaatcgtggataccgcctttgctcgtaaggttgggtgctacatcgacaggagccagagccaagagtgtgttgggatcggagacaacgtgtatacaacggaaggaagaacacggatcaagattaccttgggcggatacctggtgtatttcttcgacatttgggtgggtgacctatctggacaagaggccatcctcggtatggattacatggttccggccgggatccggctggatctggccgacgggactctctgcctgcccgatgaagtccggatccagctcagcggacgccgtccactctacagtgacaaggcgcagtccgtgaagctggatcgatacttgcaacttgggatcggagagtccgcggagctgcccatgcgtctgcgagggtcggaacacgacaagctgtgggttacgcgaggggatcgatgggtgccaacggtgatcaagggcccaggcaaggtacggtacctgcagatcacgaacatcggagagaaggagctggtgttgcgccagagcctccaagtcgggatgtggctggccggagatcgagtcccgcggatccaaggttacgtgtccatcggatcccgccgctacatagagtggcagaacctcgcgctgcaggccacgacggatgctggatccgcggaggcggaacccccggaggccccaccagggcctatggtggagcgccccgagtacccgacgccgcgcgcaatactgcagagacagcatccagcacaagtccgacaggtggaggccagatccaagggagctgaggatggaccggacggatcgacgtcagatccacccgaccagacgaccgaaggacacatcgccgggacgacaggaataccgctgccccaagcttcaactacggctcatgcttcagattcaggatcctggtggtggaccgggcgaacggactgttgaacatccacaggagtcagatccggtgtcagcagcagacggcgaagcgacgcagctgagggtgccccgggtagcatctacccgggtgcaagaagaagcccaagctgctgcggctaagcgtacacccgctcccgatccagacgaagctcctgctaattgcgcgcccgacctggatccaagcgccggtcccaatgtcgaagactcgctgggaccagatggcggatcgacagaccaaggtccgacaactgacacgcaaggctgcgaggaggcgctgggtccagctgatgtgggacaggcggcccatcccgctgtcgcatcgggtggtaatcacgaagagacaaggggcggatccgcagatgcaacatatggtgctacgggacaggccatggatccagtggaacgtcaagttgcagatggtgagatgggacggactgcagatccagacggagagaagagacagaaatcaggtccgacgtcagatccaacgtccagccccgatccaacgaccactgaaaatccgcggtacaaagactcagaggcagatgaccaagtctgttaccatgtgagcggagatctacacgcggaagacgttgaagctgagatggccgtattgcccgaagttactccggctacagaggaggtgacagtcgaagacatccaagtgggagatccagatgttaatacggcggaagagattgaccgacttcggcgacggatctacacctgctgattggcaaaggcaacgcgctgcctcctgcggctcgaggcatcgtgtgtgacatagatgtcggggatgctaaacccattgcccagcgtgtgcggaaggtggcgccgcagtatcatgagaagttgtcggatctgatcaagggattgctcggtgccaagatcattaaggattcaacttccccgtgggcatccccgatcgtggtcatcatcaagaagaatggagtggatataaggttgtgtattgattaccgactggttaacagtctgaccagactgatggtctacccgatgcccctgattaacgaccaactggaggatctggacaaagtgctgtggtattgctcgttggacatggccagtggattctgggtggtgactatgacggatcgggctcgtgcgatttccgctttcatcaccccgttcggattgtacgagtggaaccggatgcccttcggattgaagaatgcgcctcagatatatcaacggatgctggacaacgcgctgtatgggttcacccggatcccacagttggaaggtggatcgggatcggacggcggatcgaaggttacgtgtgggattggatcgaagtcactggatctggatctgaagtcaggagagcctgaggaccctggcaaaccgtcggtacttggacggcgatcctacattgacgacatcttcgtgaccgctggatcctgggaccacttatgcgcccgggtggacgctctgctggacgcgtgtgacaaatggaatctttcgatcagtgtggtgaaaagcttctggggcaagagcaaggtggagtatctgggccatcgagtgtcccatgctggattggaggcgaatcctaaggatctatcagccctgacggatctacccttcccagggtccctccgatccatgcagtcattcctcggcagcctgaactattacagtcggttcctggaggactatgcgatctacgctgcagttctctatgagctacgagaagtggacttcgccgcgatgagtaagccggacaaccaaagcgcatccaactcaccatgggtttgacgacctcggatccaatagatcggcactcgtcggatccattagggccgaggacggtggatctacaacttcgatctacagagactttcgacctggaggcgaaggatcctgttggcgtgaggactttggatccagaggcatgcgacccaggcaatgtggatctacgctggatccgagctcatcgggccttcgcgacactgaaggagaaggaagatggcgaggactccaatcctccgacacttcaatatggatctgctgccagtggtggtagtgtatgctagcgaatgggccatttcggccgctctgatgaaggagtatgacgggatccagtacccagtcacctttaccagccgcactctgaaatcgaacgagctcaattacgacgtcgtcgaaaaggaggtgctagccctgctgcggattctggatctgagctacaatatgttggtgggtcgccagatccgggtcctgactaggcactcgactctggcctggctgtttcgatccactggtctgcaaggacggctcggacagtgggccgcactcctttcgccatatactcttgagattatgaagtgcgcaaagggcgaggacgagatcctaggaacgctggcagccagtatcacaccccgatccaaggtggatcgggcattgatcgacatcgcacctaagaaggagccgcgacgcaatgtccaagctccgatcccgacagtacaacctggtgaagaactctatgtggtcagctttgatggatcagcgcgtgtcaagcgaggaggaggcgcctacagtgcgaacctttggaaactgccagagtggaacgtggtgaaggctagatccgggtatgccgaaggtctctccgtcaatgaagcagagtatcacggacttctgctatgcttggatctactcgaaggcgaggcacagtgacgacttgtgatctgtggtgacttcaatctggtggtccgccaggtccgaggtgagatcgactgcatggcacctggattgacgctgttgaggcagaaggcgctggatcgactacgtgtctggcccaaccacgagctggtgcatgtcaagcgcgactggaacggtagtgccgacactctcgctagcgcggcactccaacgtcaagccggaatcatggtggagggtgaagcggacatgcaggatctagtcaccttgaaccgcctggatgagatcctggtggtgaagaccgaagaggatgcgtcgctcgggtgtcgcccgtaacaacccgagctggtgcaagatcccgatccaactcccgacctacatccaattcacaggtcctacaggaagaagtggtgagagacctccggatcgctaggatccgccaagcgcaggacgaggaggcgtgggtctccggcttgaagaagtatctggcgggcgacattcaaggtctgacgcaggaggaagcccgatcctacggtactattgcgatggattacgaaatggatcggaacgacctgctcttctactgccctccgacgaagaaggtggaggcggatcgcgatggattgatgaggttggtgcttccagagacgctgcagcgagatgtccttcatcactaccatgtcagtctggaaggaggccacgaagggatcggccgtacctaccagcggatccgagatcacttccactggagaggcttgtatcggagtgtccagcaatatgtcggagagtgtgtggattgcgaaaccggcaaggggcggcccacgatccaaggcgagtcgcctggcaacatccaagccacatacccgttccagatgatagcgatggatcacataccgtcgctgcccagatccaacaaaggtaataccgtctgttgatttgggtggatctgtttaccggatacgtgattgcgaaagccagtgactctcgaaccgcgcagactattgcggaatcctacgaggagtgtgtcttcaggagatttggtgccagtgaggtgatccgacacgaccgtgagccggggttcatggctgacttctttcgatccttcaaccggatcctaggtcagcgacaacgcgcaacaatggcgtatcggccgcaggcgaacggaacagcagaacgcatggtacagaccgcccccgggctctcaaaatgcatgtgcaggatctggatcaacgcgattgggacgattacgcggagcgactcaccttcgcactcaacaccgcacaggatcggattcgcggagaaacaccttctacttagtgcatggatgggatcctagatccaccctcgaagcgacgatcccggtgggcagcactcgccgtcaggatcgagatccgaggagatggcggtaccagatccagcgctactaccaacaggcgcgagcagaggtcagcacacgattgcaggaggcgattgcggatcgagcggatcggcataacgaggagatccatccacatcagattgagactggatcccgcgtctggctattcttggatcgggtcaaggaaggatatgctcgtaagttggcgcacctgtggcacgggccattccgtgttgcggagaagatcggtgaatatgcggtgcggatcgagactcctggaaccgaatacaggctgttccccgtggtacacgtgtccaagctgaagttggttcgaagttttccggatcgtcctcggatccagctaactgaaggcactacagatcggtacgactttgatgaggcgctgttgcccgaggacagttggatccaggatctggaggaagatgaatacgaagtggaccagattacggacatgagaacagggagacggactcgttacggacggatccatcgcgaattcctggtgcactggcgtggatacgaggagccatcttgggtagacgaggcggatctcaactgcggtgctatactgcacgagttcctgcggaatcgcactaaccggaaccggtttggtgtgatgcagtctcatggggagtagtggggctgcgacccactagagcgagctggtcgctctatggaggaactgagatgatggatctgcaaggtggttgcagattggtggattgggactttgtgtatatgcatgtatggatcggacgcaagtggcgtctgaacaaggcggaagaagatggattgggtgctaacggaagctcctaacaccagatccaacgctctggatgccggtctgaacggagtcgaggggcaacccagcagacgtggatctggatcggagaatttggatcggaccggcactagtcggcagcaatggatcggagaagacgaacggtcgggtacgctacaggagagtggattgggacagaaggtgtccccccgagtccggatccaccatttccgctcacgacagctatggagatgaagacggttgaaaataatggggacgcagtaagagagtgaagagcgagatggattacggcacaacgtcagtgtttactggccatcgacagcgcggagattgtagagctcagcctcagccttttgaagcacgttccaagcagtgttcagcgagcccgcactcatcttcagcgttttcccgatctcgttcaaggttggggcaatggacttgaagctcttggatttcggcaccggccagggttacctcggacgcgagatgatcgttgctctctgtcaagcgctgccgctcacactcaactcggtcaaggtaatgacggagacattggatctcgcgagcctgccgcgcgacttggccctggagatcttggatctgacgtgtatacctgtcatagtggagatgatgagcttccggggcagtgcaaggggcgctacgggcggggtctgccatagtattataggcttggtggatttgaaagtgagaacaagtgtctgcagtgataccgctggtcggcaacaactacagacaggaggcgattgtggagaagcaggatccaagaaattgggacaaagggtgatcggcagaatgatggatccagactccgcgatggatccaccagactggcggatcgggccccgtaccaggtgttagagattgcaacggaagacaccacgaatacgaccggacgtcacgaatgtgtgaccaagcaacgccatgcctcgagacccaagatccaagagatgcagctgtcaagtggattggcgatccgatccaatccagatctgattctgattcggactcaggtggaagtgagcggtggatctaaggtcatggcgcagcgaaggtaatcaagcgacacgcaaggaaggtgaacaagctccatagagtcagtaggtacagatgggatgacaggatccataggaagataggactttgggatgggattggacttaagcataaatcagactcgaatttgccttatacatcgcaagtgccttcgccttcgcctggaaacgggaagtacattggccccacggcttagcaaggttctggtagtgaatctagcgttggttaagactggataataaattggccagttctacaaccttcctagtgacctacttgcaagtgcagatccccgatccacccggagttactacttggccgggtgcatcctcgactctcagcatctacggatcccgctataggaagcggcgagtacggcaaaggaagacctgcgaaggcaaaggaaaggaacaacaacaacccgcaggcaaccccacgaccggatccagatccaggccgcccgatccaagtcgactaccactggattgggagtaactactgcgaacagagtgaagatttccgcgctgctccacccacatccccgcgtctcgcccagactgttctgtcttcaaggctcggacgcttcagcatacaccagaggagcagatccagccctaccgacgggtacacaaggtgaccagtccagcacacagatcacggatcatcgggggaccccctccgtaagtcggtgttcgggcgcagttggtaagttggattggcaatctcgcagattttgctgatcccgctacgccacgcggccactacgctgctcaaacgcagagtccaactagaaggagcaggcactttggcgagagatggagctaggtcagaggcgtaggtagagaccggcttagaaaaggagcgtccttagacagccgacaacctcggacaggtctgtgggcctgctcctacgcctatcatccgaacatgtaaacatgcaagaacgaggacccttcctgtttacgcttgacgcgctctaggtccaccgtccactcggtcggggcgtcaccaatagacacctcgcacccgcgcggttactaaccatgctcccagccactctagacgctacagcagtccatcttttgactcaccttgcaattgctcgcacgttccaccggcgtcccacgcagtatagggccaccgccgcagaacagaacgctgagagacctcttgtgttgttcggaagggccggcactcctgccgcagaacccctcgcgtagtagattagctgcttaacttagactattctcgtctaaatcgcaactgggaggtggagcggccggccgcacgttccagagctcccctggctaagcctatactaaaatctagactactgcgcgatcttcaaggggaccctcacccgtcgtggccttccatccgctcgttttggatccaatgtcgcctctccttgcccccatagtcttcttctgcttctctccaccgtgtcctctctccacgacgatcttccacggtcgccgtcaacacttccagcaacttcaatagcgttggtgactgcagcacctcccgtcaccagccgcaccgcccttgtcaccgaacaccatgctgtgcaccacaccgtgcacactacggtcacactgcttgccgctatcgtcgaactggtgctcctcccgaccaaagagcacgggttgcctacagcttctatcgcttactattagctgctatcgcttactctccgccgctatcgctgccttatgcgctactatcgctcactgccataacgattatcgtagaatgtgtttatatgtcgctacagcgctattatactaagtagtaaggtgcccgaccccagcgatatctgctactacgcggtgggcccattttaattaatagcaggtgttccaaaaagtattatattaggccaagcgtcacggcgggggtgacgtaatcgcccccgttccgctcgcctcgtcggatcgctgcactactcgccgtgttattagtacataattgtagggccccgcggcccgctagaacgcacgcgggtgctgccttcgctgcgctcggcagcttgtaatggggccgccttcggcgtccaaggctgtctatgtacgattatgtgggccaccttattatgttgtcacgggcttcacacggacggacacactggacggtctctctagtagatggttaggattcgttctcctgtgctagacggtaggcgtcgatattacgcccgccacgacctcttacatgggggaccgttggaacggtagaaataaaatatatgctagtaggactgcaaagcagcagagaagtaggtgtgtgctatccgtttagcgtagatattacgtaaatactgggtgattccgtccttgctttgatataaattgtatgttttctttatatttccttccatctaagcactagcgagttcaggccgagctttagtgagatcgttgcgctttcatcattgataatgcagttaatgccacgcgaccttcgcacgtaaggagcaagtgctgcggaatctctcataatcataatatgtccaaatgtgttggaacttgagtaaataaagcgtttcagtcgtacatctcacgaataggctggagagatagcgtcttaggtctcataacaggtcatgaagacagaccggaggaaagcgcgagatagataccctatcataccgctcaaaatataatttcaacgctatcggaaacgccactgtgcacatccgagtatttattattattattttaaacgacacaaggtagagcaacctggtgggccacactttcgaacagcatggaattggttagcacgaatgcgcatgcaaatgctgtatccgtgatcaaaagtcgtattgttaactacaacatgcacgagcagaagtaaatcctactcatcaacacgcccatgctgctgctacgcattaccgatgtctcccagcgtatcagcatccttctaaccgaggaccgccgcctacagtagccacttcgcttggaacatgcagttaaaaacacacagcagtgaagagattttcgattttacattttgttcaaaataaaatgaccttcgatcagattaatctagacaatctatccaaaataaactgacccggtcagattatagcgaacgatgaacgctccatgaaccttaactgcactcatgcacatctccgtgcatgtttgctagtggtcagtaatgtgtttgccaacggccactttccgcgacaagtctttggtcgtgtcagtttgtgtttgctagtggtcaaaaagtgtttgttgttggccagaaatgcgtttgctgttgtaccagactcgctcgataccactggttcacacgagtaaaggacgataacaacctcagatttgtacgacagcaaccacaccaaacgggcatgagcaaccatagcatgatcgacgattgggaaatggacagatcggtagctacatgcagagcgacccgctctgggaaatggactggtcaaaagctagagcgactcgctctgagcgagacaacaatattattgagagcatgtgcgcgcaggtacatgtaacacctgcgcaataaatgtaataaggatgccacggtacttatatttataggatttactcctcttatttgctacgttggccgcgcggataatacgctgatgtagaagcccacggtagttctcgacattgaacttgtcggaacacaacttatccattgatccacgtagcatatgcgggcgatctttcataatcgctgtggatatctttttcgatgaagtagagcagataaatttcacaatcaacagagttttgctgctgaggcttggtagggcaggcgtgaaaactccatttaaccgaccccaccgaagctgtttctagggcccgctctttcgccaaccaccactgcatcaaggaaaacacgtttgccgtatcgttctcttctgtaggagaattaacgtcatacagccgaatgacgcccccctgcaggggattctcaaccacaagaaagctccactggctattaccgttgactggaagaataacaaaccggtacgatacccagtcaaatttccctatgtgaccagcgaggcgctcgtcccttgcagttttccctttcgtttttttcacggcttgcatcgttcggaaaaaaaaagttccgcggcaaaaaaattaagccattctcccgaggcatgaaaccatgcacaaaataatcaacggtggactctgtcaaagtctgatgcggcattaggctgtccaggtcctcgcgatagatccagctcgtatcatcaccacgcgtccactccaatattggcttctgcctccgcgacctggtagcagactgcctccgaggcaaagaagtcttcttagcagctgtaggcatctcatactcgctctcttcggactcgttacaatccatactctcgctactgctatcgctttcatccgatccagcgctatcgtagctgtcttcatcgctgtcttcatctccacagccatcgaagtgtacagcgccgtcaccgggagttacaccattatcttgctcgtactcactgtcctcaccaggggttacgccgccatcacgaggggttactctatcatcagtagcggttactccatcattttgaccgctctcactgtggttacgccgccagcacctccattctcctcgtgctcactgtcatcgccacggattacaccgccaccacctgaggttacaccgccgtcagtagagggtacaccgccatcatcagggggtacacgtgctgtgtagcgttggataaaccgttttacccacgttacttgggacatcaaaatccgagttgaactcttccaggctccggcaataaaacatcacatcgccaaacgtcctgttgtcctccataagctcatcaaggtattcgattgctctctattcgtacggcttcatcttgtgttttcgtcctccgccttcgttgcgcttgcgatctgagccaacctctttgtcacaaacatcccagtagcgcttcacccagcctctcaaagtcgattccttgacctcaagctcgacagcggcttcttttagagtccaatctgggttatacactttccagcgcctaagaagcgcaagcttctccttctcagtgcgattcacacacacccgcctcttcattcagaaaaggggggaagggaggggaattctcgaatgatagtcagccgtatatggccaatcattttaggtttcatatttaatcagatcaagagtaaatatcaaataaactcgcgcgaattattctgaatccagcactttgaggttagtatgaagtacttcggggttagtatgaagtagtgcgtaaccgacctacagcaggccaggggctgcatgaggttcgaactgcagtgcttacattccctaagcccgcatttgtggcgatacgcttatacttgagcagtggtcgtgaacttatccggttaacacgaacgcctactcagccaagttgcctttccgtccattgtagctagtagggggttgcatgtacaggatgacagcagcgaggcccaagacttattgacgcctgaacaggacaagcgcgaagcgacaagtgccgagcacgaactaagtcaagggatgatccaaactacacatgtgggctttatataactcaatggaaacctccattttgatatatggagagtaacacatagtgaccatgttgcgttggcggcaccaagtgctaacagttagcaggtgcttccaagccgatgaattctaaattattttaacacggaaaacgctgttgagaaatcaagatagattccgggagagctcgaaagtgatttcgttacgcgagcctgattgttctactcacaaaaccagaaacacctacagagtggcattcgaatacatacaatgtgattcatcaattatatcgctttgtgacgtagatgtttatagatcttgcgatataagcaaggtccaggaaacaactacatggtatcggtggcaacaaccagcgtccatttcaacattcgagaagtacttcagacgtaaaagatgtaatattcctatagacacgcaggtaacctcttgccgggaactaatcttacaaaaattgcatgtcgagggccgccatggccagggggggcgcccaacttggcgtctgatggggacgggctcggttggaggtggcaaattctcagatgtggttgacgtagaccatacatatggcccagaactggtaaatgtttcttgccaagtcgccaaaccagtctgaaatgaatatgggggagctgcaggacttggctgtgcaatcggcgggtagagaggctggaaatactgtagatcgagctggaaagccaccgggtctggtaaagtcgccgtgaaaccagttggtctgtaggcatatgctgtgtatctggggtgatcttgcggtcaaaagttgaaaccaggcgcgaagccaatatcgaacccgacttctgccccgaccacaccaagactttgagctgggaagttatgcgcatgtctcctgagatcggacccggtgtgattgccatgcagcgacacttcgttcgctgccagcagtaaaccggtagctgaatcatctacatgcattgtagccgcactgctcacttgtggacgcttctggtgcacacgcctatccttgaatcttaaattggacccattaactccaggcacgctgcgtccgtaagccgcacgtccacagattatgtgggcacaagacaggaacttcttatagaaaagacatgagcactcaaacggactcaggtgcaccgcccacccgcaacgtggcatgctaacgtggtgcgcgcggcgtacagaccatttcacagcttctcgatagaacttggcagcggtagccttttctgcatctgttaaacactcgggcgatatgatgacaggagttttggcgttgctaggttctttcaactcgtcaaaatcagacagttcttccaaatgatcaccgcaatgacatagcacgcgaacaaccgacttcgcggtcgtagcttaaacgacgactcggttggtcgacactaacgttcgggccagctgctttgcaacttgaggcggggcgtttggtccagatgccatgggaggtggtacacacagcgaataatcttctgcaatcgtcagtagcttcatcaacaaacggcgccttccgctgcgtgtagcgcttgatgctggtattgaacacttcacatgggttgttggttgtagcgtacccccctggagagtgataaatctgccatctccagaagcggctatgaatccattgtgccgcgaaatatgccaaaaagacgtgcgaccttctatcgcattgccactcttgagatacacgcccccacacctcccaaaattcggtttggttgagtgtgtagtgcatgtcaagaataccacgatacactatagctcgcacagaatctggcaagtgtcgcactcgcttgcgtacattgtacatcacgtggaagaaacacatcaggtacgggcaggttgcatattctgcaacatcccgcagtccgttcaattgggcctcttcggcgtcgcccattgtcacgtcaactcgtagtggtcttttcatgtgggtcctggaaattcgtgcgaaatctccaatcgatttgtaatattcgcgtcgggtcctttggctaacaatgaaaagcgcggctaggtggtagcttcggtggcgatcggtgaaaccgcacgtaataccagggtagccgatgtcgctcagcttgaaagtagcatccaagtgaaaaatgagaaaagcttcgcgatcctgtagcgaactcatgttttgcattagcttcaaactcgtgattccaagtatcaacgggtcatcatcttccccgttaccgacaaaagggaagccgtgctcgtcttcacgatttccaaacacaaacggggtgtcgggatccactccagcaacgaaggccttcgccttcactaactccttcgtcctgacaatagagattttagacccctgcagccatcgaatgtacttgacactacgccgaacttgagggcacgacggaaacccaagcattggagtcggtatttcaggtgcacgaagcatgttgctccagattaagcgtggtggtaccgcgttttcgtccattcgctggatgtagtcgcgcatttcacgtgtcaccttggcgcgaggaggtaacgaacacgctatgtctccacgcgcgtgtggctggctatttgtgtacgcaatccaccgcttcgaagtcgggcactcatgcactttccagagcgttgcaacagttcctttgccgtctggactctgacagcgaaggcgccgctcagccatcgagtggtctccgggacaaatcatacaccagcgcgtcctcatccaaaatatggcagaacagcaaaatcgctcccagcgaaacttgacgaacgcatcttcgccttggaactcgcctaacttcgtccaggtgtggtttggagacatctgaggtggggacagctgcagctaggtactccgcaaactctcgaaaggtacgggcttgttgtgttgtgtggggagctgttggccgacagtaatctcgtgtagattacaccaaggttgtgatattttgaatatttgaaagtctgagcgtcagattaactcgcgcgagttattgtgaatcaaggaattcagattaactcgcgcgagttattgtgaagcaaggggtttaagctgcgccacctacgcgttagcgctggtcatcactgcggtcaacgttttgtatggttgccgtgctttgaaatactgtaccggtaacagctctggcaatgagatcaggcttgggaactgacaatctggttactggtaccggtaccggtactatacttgagaaagtactgttagaaagtgctggttgctagtgactggaaaagtggttgttgacgatcattttccagctgttgtggttgttctcgtcttttttaggttgccattgtcccaaagtaagttgtttgtggtccaaagttggtacactggcgacccggacctctggttcacagaggttttccggcgaacagccgggagctgctccaggagctgttcaggatttgaaggcagtttctgattgtttaatgtatgcactgcgtacggtacattgacgaaacctcggtatgttcagcaaatgaaaaaaagagcgttgataaaggcgctgagtgggaatcacataaccgtaccaaggtaccaaatggcactgagtcaggtgatattggtaccgaggttagaaaagaggggtattattttcaaatagatttcataaatttcaccaagtgtagagattttgttgtgtggctctaaatgcttcaagagctctgtgttgcacgaatgttgcaggaaataggaagtggtggcaacggtcgttcgaatgaaaaaagcacttagcgaatctcatattgaccaagaaaacagtatggttaccttttcgcctgctagtacgggagttgttgaggactaggtcgcgccaatcgggtgtagagttgcgctagcaacattgacgtacctactaaaccacgttataaacctgacaataatgtgctactctacaaactgcacgttacactaatggagaaagaacacgcgtattgtcaacttctatttaacgacgcaccgaagcgcttagttacgatcttcgctcagttggccaggcatccgactgcctcacccactgtcaaatcgaccctgaaaaggcgagtacgcataccattcttaaagtgcctgtagatacatcaatcgagcatgcatagtacctataggtacccgtacggtatctacagacacacacacaccaataggtaccctgttggtatctacaggtgcacagactatcaggaatgtacacgtgtgtattatacgatacgagagtcaccctgaacagcttgaataaggctctgcgcccacgtatacatctcgaggaagcaccaccgcgtcaacccttgatgctcttggtatccctggtctcaaagtttcaccacgtccgtgcggcctagcgcaatctatccagccataggtcctgggcggcccttgcgcttgcgcggcgctcttcgagcatcatgttgtggacatctcggagcgtcacgtcctggcctaaaggataggcagtaatacatttaagaccccccccctccccccatcgttgcgatagcgatagcactaacgcgcctgtcacatcacgcaaacaccgcatggtctggcagttccagcttcgtgtacgttaacctccgagcagacgcccaggcgctgagcagcgcctgagcgcgtctcccagtcatcgcgcagtctgagacaccgactgccgttctgcgcagctctggtccgctctctctctctctctctctctcaaagccgcctgtaccattagggggagtcgaacctggaaattccctcccaaaaagtgagccaagggattcccaatatcggagcaagaaaatgaccaacagataagctaaaaatgggtgggggggtgtcggaccttgctcaactaatacatcctacttagagaaaaatcaacacgatggagcccccttgacggcgtggcgcgacgaagcaggaaaggctacgtctcgggcgcgctagagcagcatctgcagtgctgccccccgcagtagcgtaggcgccctcgatggtatctcggaggtggcgttggtggccgctaagggagagccgagcgaaggaagcacgcgacagcagcacatacgtaacactcatgctgcgggtctcgtatagctagctttcacgccctcgtagacagcttcgagagcgccctactgtctttgagacgatacctaatgcgcacagacctactgacattccttatatgttcatgcccgccgcggcatgctgctgtggcaccgcggagagagctacgcttcatcgaggcgagctcgcagcaatccgatccgaggcctgaaggtgtcgggggccaaggacactttcgcaacgtcgaacttgaacttagaaatgagcagaaaatatccaaaaaaataagcagagcaactcccaaaaagtaagcaccgtttctgccaggttcgacccccccccctattccgtgtattaacctgctagcgatagacataaacatgagagagcaggatggggaggagcaggaggaggaagggaggctcgctcactatacgtacacgaatagctgcccaatcagtcacttgaggtccaaacgtgccaaactccaaatgagagccagtatagccagtggttttttttggaggatgggagaaaggggggagaggggctgtcaagatttcgatttttgaaatatcgaaaatcgtctgtaattaatttgcgtaatttaccgggctcatactgtatcactccttttcaatacgatcccactcagtgcctttagtcagtgtcaaaaaaaatcacccctacatcaatggtgcatgagctatgcaaagtgttgtcaccttacactatcacatcgaaaacatctataataaaagctacctagcttatcgttattagaaccccaagacccattgctaccgttgattatgcgtgagcatgggctgataagtcatattgattattattattattactagtattgcagcatcatcacggcgaattttcgccccggttgctagagggcattgcttcggaaaatgttgtatcttagcttctcagcaccgcccccaagtatcctttacacactcatacttttaccaaattggtttcaaaaatatatgcacgaagtgccgggtttgcttcagattttattaaaaggaccgggcttggagtttaatatggaaaacggtataggcagcacggggaccgatgccacgagcaagctcagcgagcactggtagacagcgcgcgtgttcccgacgttgcacacatgctgaccaactagaacttgcatgcccgagtctacgagagtctggatcccatcagcaccagagtcgagcttgagtctgggcacggcacttagcgtagaagttggaggccacttgagcttcaggttgagaattcaaaagtgagccgagttgtgtttcattggggaaagcccgcaggcgaaaacccccttacggtacccagtgactacttcggcccacccagtgagcaatggagaaccaacgttggccaaaatcgcgcagagagagctcctcggagactttctcggacccatccttctctcccatagtcacaaccactcacaacttgacgttttcttagtcattggcaccttaactgggatgacactaacatcaacggcctaacctgctgctactcgtatgtgctcccgccattgatgtctcgtagagtcatccgtcgccgccataaatgaagacaggaaagaggcttgacgtaacagcaagggatctcgtgccgcatctggtagtgccgtcgtagctttcgaccaatttcaaccgtaaatcaatgtatagtattttgcttagtcctggtttccatactacagtagtaaataaacactttccgaatcattataagtgtctttggtgtttccaccgttggccgctgaatcgattgcaacaaatttccgggtggacatcgttaaatatcccccacagtaccaggctaaatcgtgctcgagcattcagcaagccaatatatcagtaaaattgtaactcatgacgaaaaattcagtcacatcacattcaacaaccaccggtatgcacatttgctcttacataacattaatttaaagctcattgaaacagcgagaccagcagtgtgtcccccaatacgtaagtgcttttcacaataacacgaactcactgtaagtgatttaaaagagcttcaagatgaacgactacacgtctcactccacatacatgttcgccagattcactatgcagtaacaaagaattaacagacgctaggggtagctatacatttggcgtttgtgtgaacatgcaagaccaaaagttggtgtcagaattgcacattgctactttaaattgctcaggaaatagcatgcgattttggagagcaacgacgtcttacttcctccgcaaatgacaatatttcgtctatttatcaaggttgtcagaataatataccaaatgtctggcaaaaagagaattctccacgttttcttcacagctacagagcatacatcctggctattgtctccactatatggcacgtctggcctagtcaccgctttctgtatcatgccaatcttcgtactcggttgcccccgctgctgcagaactgtatgtagcaagcgatttatagatttcttcagtcaacgattgcagcaactagtatgccatctaattttagtgctgccttcttgcttccgcatgagtggttcgtaatagttagcggtagcatagtattgcctttgggtttagacttcactgctccatgcccgttttgccaaggatctatcagtgtactgaccgataccttgaattaggttatctatgaatcacttaatccaaacgactcttcggtacattgtttcgtacgttagcggagactttttacggaactgcctgacctctcatatgtttttacggcgggctccactgtcatttgcctccgttaccacatttaaccggagttcagccaccccttgaaaagggttccacggtccatgtgcataaatcatcggtcgtcaactcttgtcttaaactttaacgattaacgcaatcgtttgtttgctgatacaaacggggcgatctccggttcgataaaaagttgacctcggtttaatcacttgttataccttcgaacaaggtaacatttgaagggtcgcgtttgagcgccgttcaacattagttcgtgtgttcttaaaaagaggtaagattcgatcgaaaacgcccccgggcaggctatgatagttcatttgccctactccattctcaattgtaatacaggggttcataaattggagtaaaaagtacctgtaaaaagggtaaaaagtctttatgcacatttctttataaggggggctatgccccaattaggtacttagctacagcaaacggttggtgccgcgtcgaacaagatgacgcttacgaaccattcggaattcccccttcgagataatcgattcgaggtataagttgacaaatcagatttcggacatgatcggaaaaattgaaagtgaaagtcacttgtagaaagccttacacgttaatttaactacatttgttatgagctttccgataatgtataataagcaaaaaatgacaaagtagtgctgaggtgatacgtcccagataaaaacccgggatttcgggatcgaaaaagaagatacatgtatttcttttttagactgaatcgctccacgagcgctccggattttgaagagatccgtagcttataaactcagatctagcgatttatgtggttagatcgcgattcgtacatacttaggttcgtaagcattgtttagttcttatcagtctcatttttgtacgagccacctgcgatgattgcactgtatttgtgcgaggtatgtaattttctgatcgcggggcaaaagctggtgtctgtaaccgcactcatcagcatcagcctgatgagtgcggttgatgatttgtcgcgctaatcatcatttaatcctggacgggttggggtgacgccctcccggggagcggcgcagcggcgtcgttctcgggggcgctagtgcggctccgcctcagcgccctcagtctttcacggacaaggatgtgaggcaagtgcctctggactgagatctcgacgcgggtacgactcgcggcggcgggagcggacgaaccaagcgcgctcagtgctcagccaccgacttcccgtgggctggtgactacggcaccgcccaggaagctgattcggcggtgaggcgcgagcgtccgcgaggggggaacgctgcggaagtcaatcgtcaagggaaggtgctcaaggggatcagcataaggcgcaggaacaacacaagactgaagaacaagggcgtgctggctgagactgtgtggttggtcggccacgatagcagtcgccggggaaaggagtacaccatttccgggtcgttctgcacaaatgctcgattcaaaacgatcacgtagaaaaagggtgagtatacttatggcgtatacttggccgacttctgatcaaattctcgattcaaaataaccacagccattttcaaaacgatcagctgccctttctgtgataccacagagggaagcagatcaacaattggccttttcgagaaaattctggctgatctcagtattaatttgagaacataaatacgacgcagtgtcaatagttgatcagtctttcccacaacgtaccagaaaaatggcacatgttcatttagaaaatgaaagtgattgttttgaatccgtgtactgttctggtcggagtcggacgtgtatactgcccttttttctacgtgattgttttgaatcgagcatttgtgcagaacgacccggaaatggtgtagtgaccctagttgagccaagactacaagaccgatgcgggggacggaagcagcggacatgccgccaccaaggcttagcgcgtctccgcgaagggggagccattcagtgccgacgtatgctgatcgtgacggtgaaaacagtaggagctcaattagtggccgcccactactaggggtagtgtatgtggaccacgtttggagagtgtagatcacttattccctgagcgtaaggcgcactaacgttcacaatacaatacacaatcatcatttacggagtggatccagccacttactattccacgggaaagtacgaaatatgtggcgattatgtggcgaattctgattctgattctgcctcgctcccagccactctttttcattttgcaaattgcaggcttcacggcaagcggcggagtgcgcggtggcggcgcttgggcgatggccccgcagcgtacgtgcgtcttaacatgcagccgagtgacaaggagcgcttgtggacttctgtggctggttaggagcgcttacaggctcgtgaatatgggttagatgcattttgtcgcgagtgatagcgcttgaaagcccccacatgcccttagctgtagagtagttgcacggggcgcgaccttcgcgacgtgctaaggtatatccgcctcaaaactgcgatttagtatacattagtagtgcatccgccgcgatggcgcttgcatatcccccttaacacgctgctcatggggttacaggctgcatgccatttttcacaaaagccacgtgtttgaggttgattttcgaggcaccagacgctcgttgcaagggttttatatgcgcaacggaaggtgaatatatacttctacatgacaatatgactcgctcgtactagcgatcaataatgcaggcacaccttcaccacgaagaacagctcaggcttccatttccatttttgacttcgtcgtttggaatgaacgcgatgcaaatcctcgcactcatgtaagtacgatctattcgacacatactcgccacatattttgccctttcccatgaaatagtatgtgactggatactcgtctcatcatttactcctctgattgattagtgggtgtatgttcctgtctaaacaacgacgcaattcgttgttttagcaaatcacggtgattaacccatcatagagctatgtacatgtagaaggctaactcgtcgattaatttaagataaaatatatgctaagacaaggagttaacgttgggttatgtctaactcgttgaataaataagacgaattgtattgtaagcttttgagacggtttcaaacgaaaagatgcgaagtacgaatcgcgattaaaccgcatcaatcgaaagaggcgtgtcttgcacttcgtttaagctattgaacgctccaaaatgttaagaactcgcggagcgacatcgatctagaaaaaaatctccatattcggaccccctaaattcttgattttatttggggcgtgtgacctcaatatttcttttcaattttaacgtatcgtatattatcggaaagcttgcgctaaaagcaatcgaataagagtgtttttacactttttgtgtgctcctttcactttctaaattttgatggtgaaaattgattggtcaacgaaaactccaaatggcgcctaagcattatttcgtttgaaaccggattgagtcccctggatttcacttgatattttcggtatccacttttttcctaaaaaaactatctacgcacagccctcgcgaaaagggatacgggataagaccagctcatacgccaaagatgctagggttgcctacggggagaccgtcacggccagcaagtgcgcgcaacggttcttggaagcatattgcccagggtgcagcgtatccttagatatgatttttaaatgtttaagaaaagagtgaagcatctgttgggtcataaccctgcatttaatatgcacctattcaacagtagaagagcagcagggctcgaaaaaataattataatatcataatttgagtattatattgacggaataactgattattggattttccgggtttccgtaaaatatgatattgtaccaataataagtatattaagttttcaccagatttcagtcgttaagacactaacgtttccggttaaaacccatttatacgccccaaatgttagttttacggttcagtattgcccgaataacacacaaaaataattataattattattgtgggagcctcaagaaatggaataacggattattttttcttagattcccaatttaattttatattttattttccgaacagcaaagtctcaacttgtactgccaaagcagtgtgggcctcattggtagtatattggaagatctttacacgaatgctaggtcggcatcaggatggttcataggagcccattgccaagggtgtaggatcgtttagcgaagcgagcgccccgccattccagttggggcgaggctcgaaatgctgcaggaaatctcaatgaaagaacgcttggctgggtaacctgtcttccacactatcaaaacccacacaaatttcatcaatgaatggtatcttttccaggattacgacactaacactaactttgagcgctcgacaaaaccacttaacgaaaaatgcaacatacaagtcactccgtaggctcagttctgggtgacgctctcatccctcgaggggacaggggcagtcgagttggatgcaccgacagcgtccgtgggaaccgacggggcgggcgtagcggccccctccttgcgcggcgtcatggcttggccaccactggtgtttgagaccgaaggcgtggctccattcgagtcggtcgtagttgtgggggcgtcgccacccgtcgaagggccagcagctcctgacgcccccatgggtccggctccagcacctcccgtggccccggatacgtcagcgggtcccgtggacgctgatgttcctccctcgcttgccccggtcgtgggtgcagcactatcgccaacgttggcgctgatcggttggccgtcgctcgtcttggaaaccgtgcgtgtctgtccattagaatccgtgacgctcgcgctcacggacgctccacctccagtcgatgggagtggagctaaggccgttgtcgtcgccgtgttggcacccgttggtgcgccaaagttgttgctagcgttgtcgccaacattgacgttgatgggctggccgtcgctgctcttgtagacagtgcgagtctgtccgtttgaatcggtgacacttgcgcttacgctcgtttgacctcccgttgctggcagcggtgccgaggctgtcgtcgaagtggcgtcgactcccgttgggggtccgacattgtcaccagtgttgccgccaacgctggcattgatgggttgtccgtcgctggttctcgagacggaggtggtcttcctatttgaatcggtgacgctggcgctcacagatggtcctcctcccgtcgacggaagcggtcctgaggccgtcgtcgtagcaggacttactcctgtcggcccaccgacgttgttggcagcgttatcgccaacattgacattgacagactgtccgtcgctcgacttggacacggtgtgagtttgtccgttggaatcggtgacgctggcggtcacggatgctccacctcccgtcgatggtagcggagccgaagccgtcgtcgaggtgacatcaacgcccgtgggcgttgacgtggttgtgccagcattcacattggaagtcgcgccatccaccgggttcccgacacctccgccgacattggtcgcagcgccactgacattgtctccggcaccaccgactccagctcccgggttggttacagggcttgtggcagcaccgcccgtaccagtcacaccagtcttgccgacgccagtgccggcagtgatcgcatcacctttcggataactagcgccaatggtttgggcagtttcgacgcgcgcgttcactcccccggagagcacgagtccggcgacgcacagagcggccagagttttgcaggacagcattgtggatcgtggcttcttgtatcgctatcgtagcttgtggacgtgctcgcaaattggagaatggtgttcgtcagagtgttcaaaatggtgccgttgggcgaagagggggtgagatcatacagacattgaggagaggcaagctatcggtggtcaagccaagacacggtggttattcgcacatgtttccaccacgtcagagccttgatggattcgtgtagagtaacatgaggcgatgcatacagtgtcgatcgggcgtagctagtgaagccacacttctacaactcgagcgcccgcgcagaaagacccagggccactagcgatatcgggacataatgggtatgcggtgaaacagactgacgggtgagcaccaaactcgttcagttatgatacgacagcagcgccaacgacagtgtttaccacctttttgcaagctgcagcatccggcttgcacggggcgtttactacccacctttgtattggtgaagttgaagttgtacaacctgttgaccaggtttcgtagcagatatgcggaggacagtgaacggctgcttcattttgcgaaccaagcgagacgtctatttgtaagtcggaccaattggaatcctaccaaaatctcgctttaggcgaggaggatgtccaaatctatacctcagcgcatgacgttccccttgagagactaacttagtcaatgcaccggtgcgagcttcttagcacgctcggcgctttccgacggctctggtgctgtcatgtcctatcagagactacgcacatgtattattaaggttcgataggctggctcgttaagaacgaaagatactctgttttcacgattcaggtggatttgcttcagcttaatactgaatgctgcttcagttggatacctacgccgtcctctggccagtgcggcttcttgactacgtacccggagtgcagcgccgccgcgataatcttcaggtgtgcagcaagactcgagtttcccatcttcaacgccgtctcgcgcggtcgtgccgttgtccgtgacgttgtccaggccaacgttgggtgagctgttcttcgcggccgccagcttcagagtcacgaggaaggggcccactgtgttggcctcatcatctcggtcttggtggcctggtcgatgccgcctccgccaccgccacctacgttgttgatcagcaagtcgatgggctggcctttcatgtcgatatgagcaatcttgtcgttctgaaaaattcaaggtagaggttggttggctaaatgaatggcacatgatagcaacgtgcattggtggtgctgtgcagatagcggcggagcgatgaccttctagtcgttatcctcgtgatccgtgatgaaggcgccgcggttgctgccggtgaactagacagaaagcatcgcaaggaaacatagaattacacttcgaacgttgcgtgaagatgagtgccagcttaattcaatgttcatcaaccgatttttttattattttactggccttggtgtagcctccttgaactcagaagagaacgcttgtgctactgagctgaaggttgcaaaagaatgcacattccctgctctcggcactcctacagcattaccagggcagctccaacagagcgatctgagcgtccaggttgaagaacttgcccgtgctctcgggcgtcagcgtggtgatgaggctcgtcatggcggccacgctgtccgaaggctgcagcgtcgccttgcctccggtcatgtcggtgtccacatagccagggtggaccgagaccaccgcgatgttgctctcgcgcagctcaacagccagcgcgcgcgtgatcatgttgagcgcagccttggaggatccgtagccgtagattgcatccttatacgaagccgcagtctcaggtgtgcagctggtgatgctgcccagcagcgacgaaagctgaacgacgaaggcagcgccgtggaccttcgcggcgagctgcaggttgggcagcagcgagcgcgtgaccaagaacggtccgacggcgttgacctcgaactggcgcatgattgattccttggtagtggaagtgaggccaccgggcagaccaatccccgcgttgttgatgagcaggtcgatgccaacgccctccagttgatgggccgcttcaacgatggaggcctcgtcggccgtgtcgatggtgacgatcttgaacggtgagagcgccgacagctaggggaggaggcagtcaaagtaagagagggtgagcagtagcactggaagcgaagtagagggccataccgtaccttgtccgtgttgctgttggcgcgagccgtggcgacgacgttccagccggccttgacgtagtgctcgacgaaggcgaggccgatgccgcgcgtgcttcccgtgatgaggacggtcttcttggcggttgccatggctgcagagaaatgaaggggttcttggcgaaggtgttcggggcttggagctttttcgaaagtgagactttcgtcgctagtgactacggagccctgactgtcttcgttgaagtacagtagcgccagcaaagagctcagtaacgggggagtgcatgtaagaggtttgcttacgatatcatcagcccgaaggtgtcaacaatacgttgacggtgtcttgacaacctccagcgttgccgtcaagcaaactgtcttttgtagccatcttgctaaacgcgcttgcaagtcgagatcactgacgcgcccaaaaatcgacaacaggggcaatgtatccatgcacggcacagtgtaccactcccgccatttccaccaatccagccggccgggcgccgcttttcagccaaccgcggcgcctttcaacgagcgccatctgtcctcgccgcattcttgacgttgactcgcgccgcccacagcagttcacgccccctcgacggacaccatgcgctacgaccagcagcaacagagcgaccgccccaagctcttcatgccgcccatgacgcacatgaacatgcacgtgcccgcgcagcacgactacaaccacctcatgcagcaacaccacgcgcaacaccagcaacaccagcaacatgccatcaaatacgagccgggcgcgcactactaccagcctgcgcctcctgccccttccgcccaacacgcgccgctgctgcacgtgtcgtcctccgcgtaccagccgcagcccacgccgcccagcgccggctcgagccccgcggccaagaagcgctcgcgcgaggacctgaacctcaaggagaagcagcgcatgttcaagctgaacgagcgcatcgcgcagctcaagacgctgctggacgacgccggcgtgcagaccaagaagagcaagcagagcatcctggacaacacgacgcacctgatcgagaagctgcagagcgacctgctcatcgccaaccagaaggccgagcgcgccgagcgccaggccgacagcttccgcgcgcagggcagccgggccggctccgccaaggtcgacaagctgctgcgcacctgcttcgagcgcacgtccacgccgcgcgtggtggtggacttgggcttcaagacagtcacgtttaacgccgccttcgccaagttcgtgggcgtctcggagcccgcgctcaagaagaagaagacgctgcgcccgtacctctgcgcggacaaggaggcgctggacagtgtctttgagaagacgcgcgactcgaagcagtcgaggggcgcgctggtgaagacgcccgctgcaggggggaagagcgtggcggtgagtctcgtggcagccgctgtgaccgacgacagcggcgaggtcgtcaacattgagttcagtctcatcccgatggacacgccgcaacagtcgacgaccgtcaagaggcagacgactggggacggcgaagacaagaagagcaagaagggaccggctggctttgagctgcagctgtagcaccgacggaagttagtcagaaccacacaagtaacttcgaccccacccaccaccaccacaccgtttttgatccgagtcgagttcgcgcgcccaagagagcgcccaatgtgagcgtatgtatgagaataagagtagtaaccttccacacaatggtcaagtattgatcgcaattcgtcgcaaatacgtcctatccaagcaaaaaaaaactcgaggacaagaatgaaaaataacaacatgggacggggaagcgcgttttctctaccagatactgccccggagactatgaagcaccaaggaaaaaaactcaagccgtctgctgcaggacttacaataaaccggcgacctgccggggtggacaccagcgagtggcctgcgctcccagtgttcactgcagcgcgtctcgtttgccgcgaacagcttcacgttattggagacagcagcgtcctccgggagatcgacagctttctggatgaagtttccggatcatggagtttctccactgcctacaaggtgtcgggtggcagtctgcggctgctgcagtacctggcgacccatgaatccaagacgaaagactcctttctccgccgctgggacgttaacgccgtcacaggccaagcagcggctcgtggggatttggggacgctgaagtgggtcgcagagagctatttacccggagaattcctcacggaagtcgtcgctgaagctgcatgcaatggccacatgcagatattgacatggaatgtgggagaactatcgcagcagaggctactggggaggagttgagctggcgggggctctacgtaaccaccaccaacacatcgtggactggctacgagaaaatgttgcggttcggcctgaatgtgccgggtatttgatcaaggcagcgaccgagtgcggaaacttggggatcgtgcagtggatctacgacaactttgagcttgaccttgtcgatgcgttcaacgcagctgtgttgaagggtcagctgggaatcatactatggtttctagaccacgctgagcacgaaggcctggatgctgctcttcgggacgagaatgtctacatgagccccgcagagtttggcgacctgggcatgctaaagatatttttcggtcgggggctagtgcaagagcctgcagaagttttggaggtggctgctggacacggtcatttggacatcgtcaaatggctaatcgaagagcaaggaatagaagatattggtcacgcatttgatcgagccgccgaccatggacatctggacgtgctgaagtacttgcgcgaaacgaaggctgaagcgtgcattgactcgcttttggatggtgctgccgtcgccggatacatgggaattgttcggtggcttcatgaaaacacgcgagctcgctgtacggtgcaagccatggacgaggctgctgccaatgggcatcttggaatcgtgcaatggctccatgccaactacacggaagggtgtacctcgttagccatgcacgtggcagccacacgcggccatattgacgtagttaagtggctacacgagaatcggagcgagggttgtcgccaagataccatgtacttatgcgcctgccgtggggatctagaaatggccaagtagttgcgtgctaaccggagcgaggctgtcgatccggaccgagctattaacatggacgtagctgctgcatttggctacttggatgtcgtgcaatggtttcacgaaacccgcgacgaaggatgcactagctgggcgatggatagagcggctgggaatggtgaacttgatgtcgtcaagtggctgcacgagcaccgtcgagaggggtgtacaaccgacgcaatggacgacgcagctagcaatggacacttggaagtggtgaaatggcttcatgataatcaagaagagggctgcactacgaaggcgatggacggcgcggctgcgaacagtcatttgaaggtggtcaagtggcttcgatcccatcgctccgagcggtgctcagcgttggcccttgaatggctttcagcaactcaacacgcctcgacacagcggttttcatgttctcggaatttccggagtgccgtaagtttcgattggggtcaagttttgaagtcgcagggctcgaagttgtggagtggctgattgagcatgcgcctaccgctctggaaggttgtacactcaaggtgaagtcgtggaactggcacgtttgcgactggcttcggcaacatgactggaaagtagtaagccaagacaatgctttctcgcaattcgtctggggtgcttgagttaggcggacggacagtaccgtttcaacctaatacttggttttgctgcgtttggcttccttcaccaatgtgtcaccatttttaaaacgttaaaaggttgcccaaaagctgctacgaagtattagtcgttgtagatcatagtgtacgccgatatgaaacttgtccggcaagcgcttgccgtccgtacgtgctcaaatgcactaggtcggggatttcgtgaaaagatttcataaacatagcaaagatcatgtgttactgtagccggttgaaaggaggtagcagcggaagtgttctaagctatctaacgatccgctcgtgatggaacaacgcgcgcttccatggtcagtctgcgattctctagcaaccgttgcgatcaatagcatcgcggtctccttaccggagctacggcgacagcgacggggacgactataccccacactaatcctgcgaccgactccgttcattggggacagcaacctgttgctgccgcctacgccgaccctttcgctcataatcgagtggtcggcggctacgcgctgctccagtcgttcggctcgctagattgaggcgttgttcacgccacaaaactcaagcgtctcggacaatgcttttctccagccgacgcaataaccgtatcagttgctcacggcttgcaagttcggtagctgtggagcgaacaggtataagctgaatatgggacggggaccccatatctttcttcgtacattgtcgatttccgctcaccaagacaacaaacccaagccgtctcctccaatgaatcggcaggtcgcccgtgtggatacaagctagtggccagcgttcccagtgttcacggccacgcggctcgtttgccttcacgcaattggagacgatcgtgtgcttcgactggtcgactcctttttgaacgaactctccgactcgttaacgttaaccgctgcgtacgagctttcgggtggcagtttgcgcctactccagtatctagcgactcacgagactgtatcgaaggacttttagcttcggcggtgggatgttaataccgtcacgggtcgagccgcagtacgtggcgacatgagacgctaaaatgggttacggagagctatttacccggggaattcctggctgaagtcgtcgctgaagctgcgtcgaacggctacctggagattttgacgtggatgtgggagaaacaccacagccgaggtttttggggaggagtagagttggctggagctatcttgaattcccatcagcacgtcgtcgactggctacgggaaaatgttgcggtttggcctgaatgtggcgggtatttgatcgaatcagcggcgggggttggaaacttgggcatcgtgcagtggctctacaaacactttgagcttggaattgttgatgcatttcatgcagcggcggcgaaaggccagtcggaagtcatgctttggtttctggataatgctgaactggaagatctggatgctgttctccaacatgacagcgtctgcatgagccccgcgaagtttggtgacttggacatgctaaaggttttatttggccggggactggtgcgagaacctgtagaagttctcgaggttactgctgagcacggtcacttggacatcgtcaaatggctcgttgaggagaaagagcttcgagatattggttactcattctatctagccacggtcagcggccacctggaagtgctcacgtagttacacaacaagatgcaatacggttccagcgtcgcgtttgtagctcgcgtttcccgtactacatgtagaaccttggaggttcagtggctttacgagaatacccaagttctcacaatatatggggtggaggacgccgccgccaataacgaccttgagatggtgaagtggtttcatgctgataacagggaaggaagtagctggtcagcaatgcacgaggcagctgtacacggccaccttgaagtggtgaggtggcttcgcgccaactggaattctgattgccaaccagataccatggaaatctgcgccagacgtggtgacttgaatatgatgaagtggcttcacgctaacaggcacgaccaattcgatcttcacagagctatggacactgccgctgcccatggccacttgaaagtggtgcaatggattcacgaaaaccgcgatgaaggatgcactactcaagcgatggatggagcagcaatgaatgaccatcttgacgtcgtcaagtggctgcacgagcaccgcccagaggggtgtacaaccgacgcaatggacgacgcagctagaaacggacacttggaagtggtgaaatggcgtcatgataatcgaaaggaaggctgcactacgaaggcaatggacggcgcggctgcaaacagtcatttgctgcgatcccattgctccgagcggtgctcagcgttggcccttgaatggcttttcatcgagtcaacacgccacgacacagcggtgttcatgttctcagaatttccagagtgccgtggatttcgtctggcgccgttccctaaagtcgaatgggttggcgttgtggagtggctgattgaacgagctcctactgccttagaaggtcgtgcactcaaagtgaagtcgtggaattggcacatttgcgactggcttcggcagcacaactggaaggtggtaagccaagacgaaggattttcgtatttttgttcggactagcaagtgaggcggacggacagcttccttttcaatgtagggatacttttatgcgttgatatcgttcgttaacgttgtgccaccattactgtagctgatagggcgtcggtagaatggggaacgctggtatcgctttcatgaatcctttattatttttgcttgcagctaaaagctgctaggaacagtctagttgtccttgccgttcgtaggcttgtacgccgggaagtcgttgtagccctgtccgcccagcgacgagttatagtacacctcgtggccagcctcgggggcgatcggccagtcgttctggaagcgctcggccaggtcggggttcgagatgtacagacgtccgaagcccaccaggtccgcagctcccgtgcgaatggcaccctcggcgcggtcgcgcgtgtagttgttgttagccatgacgatgcccttgaacgccgtcttggcgtcgaacgcggtggtgtgacggcacttgtccgtagccatggccgataagtgaatatgggacgggggcggtggatttccttcattcatcaatttccgctagttctgatgcatcaagataagaaattcaagccgtctcctgctgtaagagcaatgaatgcccgagaggatacaagtgagtggccagcgtacccagtgttcacggccgcgcggcttgtttgccttcacgaaatcggagacgatagtgtgcttcgagtgattgattcttttctggacgaactctctgactcgttaacgttaaccgctgcgtacaagatttcgggtggccgtttgcgcctactccagtacctggccgctcatgaagccgtgacgaagggtttatttctccgtcgttgggacgttaatgtcgtgccagcccgagcaaacagcacgtggggagttgaaaacgctaaaatgggtggcagatagctatttacctagggagtttatcgcggatgttgcatcccaagcagcgtctaacggccacctgcacattttgaaatggttgtgggaaaatcatggcagcaggggcttttggggaggattagagttggctggagctatccggaattcccatcaggacgtagtgaaatggcttcgagaaaatgctgcggttcggcctgaatgtgccgggtatttgaccgaatcagcagcagaggtcggaaacttggagattgtacagtggctctatggcaactttgaactcgaaattgttgatgcgttaaatgtcgcggtgttgaagcgtcaatgggaaatcatactatggtttctggataatgctgaactggaagatctggatgctgctctccagcatgacaacatttacaggagcgccgcagagtttggtgacctggacgtgctgaagattctattcggtcgggggttagtgcgagagcctatagaagctctagaggttgctgctgggcacggtcatttggacatcgtcaaatggctcctcgaggagaaagagattggagatattggtcacgcattctttcgagccacggacagcggtcacctggatgtgctgaagtatctacatacaaagatgccagacgattgcagcgtcacggttctggcttgcactagaagtttggaggttgttcagtggcttcacgagaatactcaaattgaatacagcatgttcgcgatggagaacgctgctgccaatggggaccttgagatggtgagatggctccatgagaggacgtatctggtcagcagcaatacacaaggcagctatacgcggccaccttgacgtggtgaggcggcttcacacgactcacgaggcaggttgccaaggagataccatgagaatctgcgccggacgtggggacctggacatggtgaagtggttgcacgctaacaggcacgaaagattcgatcttcgaggagtgatggctgcagctgctgcaaatggtcatttggatgtcgtgcaatggttgcacgaacacttcaagggggtatgcaacactaaagctatggacaaagctgctgagaatggtcacctcgatgttgtcaagtggctgcacgagcaccgccaagaggggtgcacaaccgacgcgatggataacgcagctagaaacggacactcggaagtggtgaaatggcttcatgttaaccgcgaggagggctgcactacgaaggcaatggatctagcagctgcaaagtgccacctaaaagtggtcaaggggcttcgatccaatcgctccgagcggtgcgcttttcagcaggtcagcgcgcctcgatacagcagtgttcatattctccgaatttccagagtgccgtgccttccgtttggggtcaatttttgaagtagcatgggctggcgttgtggaatggctcgtggagagagctccttctgccttggaaggttgtacactcaaagtgaagtcgtgaaactggcacctttgtgacggcttcggcaacatcactgggtggtggtgagtggggagaggcgagcaatctgcaaactttttttccactacagtccgtactgcagtagtggtatgccgaagttatgcgttgtcatcttgttatcacgaacagtttattatcagctaaaagctgctacaactttaagcatcctgtctagttgtccttgccgttcgtaggcttgtacgccgggaagtcgttgtagctctgtccgcccagcgacgagttatagtacacctcgtggccagcctcgggggcgatcggccagtcgttctggaagcgctcggccaggtcggggttcgagatgtacagacgtccgaagcccaccaggtccgcagctcccgtgcggatggcaccctcggcgcggtcgcgcgtgtagttgttgttagccatgacgatgcccttgaacgccgtcttggcgtcgaacgcggtggtgtgacggcacttgtccgtgaagccgaagccgaagccgtccaggatggccaggtagccgaggccgtacgtgctcagacgctccatcgtgtacttgaacatctcgtagttgtcctcgctgcccatgccggcaaaggcgccgttgggggcgagacgcacgccgatgcggtgcgccggcaccaccgtcttgacggcctccacgatctccatcagaagacgcgcgcggttctcaaacgagccgccgtacttgtccgtgcgcttgttggtgacggactgcaggaactggtcgatgaggtagccgttggcgccgtggagctcgacgccgtcaaagccggccttgagcgccaactcagctccgtggcggtaagactcaacgacaccagggatctcgtccgtctccagcgcacgcggcgtctcgtagtcggacgcgacgtagtcggcgttgcgcgtgtggccgcgctcgagacgcagcgccgacgcggacacgatctcgcccttggggttgaagctcgagtggctctggcgacccatgtgccacatctgcatgaagatcttgccgcccttcttgtgcacgcgctcggtcacgcgcttccagccctccacgtgggcgtccgtgtagcaggccgcggcgtggtaccagccgtagccctgctcggagatggcggtggcctccgagatgatgaggccggcgcccgcgcgctgctcgtagtacagctcgttgtcggcggacggcacgcggtcggcgttggcgcggccgcggctcagcgggccgaacacgacgcggttcttgagctcgaggtcgtcgcccagcttcagcggcgtaaagagcttgtagtcggcggtgacggcggccatggctgtggaggggattggcttgacttgagcgaggggaggcaaattcaggagtgactgccagcaggcacgtggggggtcgatgtcgatgtctcttgggaagacatctttgatcatgtcctcacagcggctgacgtcagcagattaattagcggagctctacgcggtgattggacgaaaagggactgtaagttgaacacgtgacatgtgagcacgtaagctgaaatgtcgacctgtgacgtgtgagcgctgatgagcttctggttgcaaacatcattcttgcgacttacatgaacatgtcgacgtgatcccggtttacccggtcgtgtgatgactgaagtggttggaacgtctcaatcaagctccgacgatgaccagctcggcaaatgacaatcaagggcgacgattgttctgggcgtcatcgctgttgctgactctccatcgagcagaactacagcttcctagctgtctacatgtagtaggaagttccttcaatcaaaatgcaaccttcggcggcaattttcgcttcatgcgagtggctggtcgctgctggccgagtaggcaatctcacttttcaaaaagcttcgtaacccccaaacacttcactaagaccccttcaacgcaactatggcatccaccaacaagacggttctcatcacgggaagcacgcgtggcatcggcctcaccttcgtcgagcactacgtcaaggccggctggaacgtcatcgccacggctcgtgcgaacagcaacacggaaaaggtactcagtgcattggtagtctgcatgatcaaacctcagtctaacaaacactggcaatcctgtagttgacggcgctgtctccgttcaagatcgtcaccatggacacggccgacgaggcctccatcgttgaagcggcccgtcagctggagggcgtcgccatcgatctgctcattaacaacgccgggatcagcctaccgagcgggctttcgtccggcaccaagcagtccctgatgcgtcagttcgaagtcaacaccgtcggaccgttcctcgtgacgcgcgcgctgctgcccaacctgcagctcgcttcgaagacccacggctccgccttcgtcgtccagctatcatcgtttctgggtagcatcaccagctgcacgacgaagactgttgctgcctttaaagatgtcttctacggctacggctcctccaaggctgcgctcaacatgatcacccgcgcactggccaccgagctgcgtgagagcaacatcgccgtggtctcgttccaccctggctacgtggacaccgacatgaccggaggcaaggcgacgctgaagccttcggacagtgtggccgcgatgacgaacctcatcgccacgctgacgcccgagagcacgggcaagttctttaacctggacgctcagatccccctgtcggagctgccgtggtaaggcgccgagttggactcgctgcacagcataggacaatggtcgtgagcctacatgcatgcattcaaatgaagcacagagaatgagaagatgcagaacatgtattcattggtaaggcggcagcaagcaccacgaaatcaaaaacacctgaaccagtaagcgtggttgaatagtgtagcgcacctcttgtcctcagctgcggctgcggcttcggctgctgctggggctgcggcgtcgaccgcgtccacgactggagcttcggctgcgacttctgctgctgaagcttcttccccgacttctgatcctgctgcgacttgcacttcgactgcgacttcgcccacgtgcgcgactgaagctgcggctgcggctcctgctgaagcttctgctcctgcttctactggggctgcggcggcgtcggaacgggctgggcgagcgtcgacgacctccacggaagggcgggggcgggctgcgtcgtccacctctgaacggcgacgccccgcgccgacggaacgccggcgagcgcgagcgggagcgacctccgcgtcggttgttgccgaaacttcggctgcgactgcgacttctgccgcggaacggtgacacgccgcggcgtccgcgtgctcctcgaggcggcgagcgctggcggctgcgcgcggttggggacggtgagcgtccgcgtccgcctcgacggctgcggctcctgggggacagcgaaactctgcgccggttgttgggctccggtctgggggcgtccggcagcacgcgcagcttgttgccgtccagccagccgtcatgcatgtggtccttggcgctgtcggcgtcctgctgggaggcgaagaccacgacggcgctggccttgccccggggcacggccatgtccacgcgcaccacgagcccgaacttgccgaagatctcgcgcaggtggtcggcgttcacgttgcgcgtgaggttctcgacgcgcagagacacaggcttgggctcgggtttgctgctgctggagcgcttggcgtcggcgggcgagcgcgcgtctggcacgaagagagagagagagagagagagagagagagagagagagagagaggagttagaggagttagaggaggaaggagatcgagaggaggagggacgaggagaagacacgcactggaggccgagcgagagcgagaacggggcgccgagcgcgaacgggacgcggagcctttgcgcgcattgcggctggacgagcggcgggatggcgactgcgccggcgagcgcgagcgggagcgcgagttacgcgaaggcgaagccatggagctgctcggcgtgcgaaatgactaggaatggatcgcgaggcggtcagaccatgctcgatcatgctatgatgtatgatggggggttgatatgtgaaaattaacgtaagttagcgggtgaggaaggtactgactaacttgcctcgagcaacgacgcacccgagctgaacaacccatcgcttgacttcatgtgtcgatcagggcgtttgccgctaagtcgtttgacctgagtgagttttctgcagcaagtctgtgcatggattccagcccgcccatggcatcgtttcttcgcccaaaccctgcattcgacgtccaccttcagttgctactccctgtgggctggtgacactactgataaccagcggtagcagacgctgtatattcttcagctgcagggtgtgttcccgggtgcgttgaattatcagtgtaactatgcgatgggtatcgcagctcattcagggggataaagctcgacgtcgcaatgctacccttgatctcctccaacaactaccacttaccacagcaggccactgccgttgaagtggaagaacttgccgctgtcttcgggagtggcctcggcaacgatcttagtcaggccagccacgctgtcctcgggggtcgtctggccggtcatgcgggtcaccacgtagccggggtgcagcgccagcgcgatgatcttctcgtccttcaggtccgtagccagactcgagttcaccatgttcagcgccgtcttggacgcgcggtagccgtacatgttaggaatcggctccggttgcagccgttggcgcaacggaggtgtcgctagcagcgacaacaagagcgtgagtccaagcaggatggacgaggacaggagaagctgcggagcagcagacaggtgttgaagtagtatgagtgtctgacagactagctacagccacactgcattgagtgagtaggagatcagtctcgagtccaggagcagactaagtgcggaaacaagttgcgtgttgcatttcacgtgactggtggcgggcatctggcggcgttcactcggtggcgctgtgaccggacccaccgcgtaacagtacatgccgcccgaaccgttgtccgcgatactgcccatgcgcgaggagacatggccaacggtggctgaacccttttggtcgaccgcaagcttcaggttcggtaggaacgcgcgcgtcacgaggaaagggcccaccgtgttgacctcgaactgcttcatcatctcggtcttggtggtctggtcgatgccgcctccgccgccaatgccagcgttgttgatcagcaggtcgatgggctcgcccttcagcagctcagcagcagccttgatggacgattcgtcgctcgtgtcgatctggacgaccttctcgagcttgagctacttgagctggttattaaaaaaaaacattagagttagaggttgttcgtgtaaatgaataaagcaatctgagcggcttacgtcgatggcgctctgaggatcgcgggcggcagcgatgaccttccagccgttagccacgaagtgcttggtgaaggcgaggccgatgccgcggttgctgccggtgatcaaaacagtcttggcgctcatactggtcgtcgggagcggagagatgtgctttcttggctgcggttttgagattggttcgtggttagcagtggaggaatttgacaaggtacaaggttcgtcaacatccatggcttgacgtcatcgtagtttacagcgaccaatgcgattcacgcaatcacaaatgtgttggccgggtcttcgacctccactaagccgacaagtgatatatgtagctagtgagatcggttttcttgtacggtgttcttcgatcctaagtaacatgcaggaaagcagtgctgtagcttacatttcgatgtgcagtttgactcatgacgtggtataaggaataaaaatgtcaattcccgtagcaaacagatatgtatgcactacacaccattggtcaaaacttgatttattttgtccaatgactcattggacaaaattctcattggcaatgagcagcagtacgtttttgtccaatcgagtgtcattggtgcattgtaccatattttaccaacttcaacgcaacgcttgactcgcacatcgacgatcttcctgctcaccggaagccaccccatctcgagatctagagatctacctgctctccgccggagagtcttcggtgcttgacacggagggaacgctggccactttcatcgctgcctgcgaaatgtgcacgaaagcagttgccacggagctcattatggctccttccaatgcctcgtgtgcgagggagggctctcatcttcgtgacttcctgcacgcattttgctctgcatttctatcggcgcggcggcagttctgcactgtcttggtctccaggccgggagactcggagcacgcgaacttctacaaggaccgggcgcgtgcttccgcctctggagaaaatcgcagtctcggtgaggagtcctcaccaaacctaacgatgaaaactctcagcggaaatgagggctgctggctgccatcacggaaagcgtagcagtcaactgcagtgcgtgcaaatgaacctctatcaaccatggtatggtgaaacatatccaccgctcgaacgaaagtcaggcgttgggagacgtcgctgttccctctgaagccttgcaatgctacgacctcgtccacggatcaccataatcatcgaatgtaggaaactgtaatgcttgcctatgatgaacatggcgcgatcgactgcaaagaaggacttgcaaggagctggtagagacgggctcagctagagagctcggacttctgccctcagttcaccagagcgaaggtcggtcgggctccgatacgctgacagcgtttgcaatccgagctcatttcccaattttccttgccagtccaagctcgtccaagtttgctctggcattgatacccgtctgctatccatggtatctgttatccaagctaccaaggccgccattgcgctgctggcactccccgtgctcgccactcaagctggaacaagcacctgtgaggtcacagactcagacgcctgcgctatcgattcgctcgcggcctccaccgacgatggcagcgtgctcatctacccgggaggcgacacgcgctgcgccttcgacgactacacggacagcgtgacgacgttcgcgtccaactcgacgtacttcttccaggtgttccctgcggcggaggcgagcaagaagaagctgctgctcttcttccagggcggcggcgcctgcgtcgacaagtacacgtgcgacttcgcgctgcagtgccagctgggcgcgagctcgctcatcactaccaaggcgtccgtcacggactcgggcatcatgaaccgcacgctggacggcaacgtcttcaacgactacaacatcgtgtacctgccgtactgcacgggcgacctgttcgtgggcaacaagtacctggagccctacgagagcgtgtacaaccaggcgctgggcaacaagcagtgcctgggccaggaccaaggcatgtacatgaacggctacaacaacacgatggcggtgttgaagtgggcgctggccaactacccggacccggagcagctcgtgatcggcggttacagcgctgggtcgctgggcgcgcagatgtggtcggcgtacgtggcgaagacgtggggagtggagtcgaagggcaccaagttccaggtgctggcggacagctacgtgggtgtgttcccggagcacaagactcctgccagcgagctgatcaactactacggcgggtgcggactggtgggcttccccgatagtatggcggcggagtgtgaggccgagacggcgacggtgatcgagatggtgagctcgttgatgaacgaggctccgagtgccgagtggctcttcatcgacagcatcgccgacaagacgcagcgcaagttctacgagctggtgttgctgggcatcgctgggtatccgttcacgaacctgctgccggcggacgagttctacggcaacatgacggagatcctggacgcgtactctgcgttcatgaacgtgacgcgcttcaacatcgatagtgaccagcacgtgtggctgaccggtaatacctacgagagcgcggtggatcttgaagaccaattgctcggtgatgttctattcgcgtggttgtcgctttcgtcggcgagctcatcaagcggttctttcgcggcttcgtccagtcgttcctctgtgagctcttccagcggctcctcggtaagctcatcgagcagcagccactcaaagcctgcttcttcatcgagcagttcgtcgagcggtaacagccccaccgtatctagtactagcagctcgaaggcttcgtcatcgagcaccggcagtcaaacggcaactccgagcgagacgcctgttagcaccacagctactccaactcaaatccccgccagtacgacgtccactcctaccgtcatccccgcaagcacgacggccactcctactgagactcaagtgccttccaccgccacgccggcatcgaccccggcaacaacgggttcttcaactgaaatccccggtagtaccacaacaaccccgactgaaatccccgccagtacaacatcaacaccaacggagacccccgtgagcacgacggtggcgcctacctcgactccagtggtaaccacgaccgcaccgacaacggcaccggcaactaccgagcccaccgtctccattcctacctactgctaaactgcgttctggatgcgagtcgcgtgggcatatcagtacaaagcacctgctataaaagactccaacaccagaagcaattggtttgtacgtacaaacacagtaatcttgtcgttgcggatgggtctagtgtagttcacaatgtgaatttcacatcgattccactcggaagctgataatgcatcccaaatatgtgcccaaatcgccccaaatgttccaaataatgaattgtctctgtaacatttaggtacatatttggggccaagtatatgactgctttctcgtaaaactatcccaaatatgtaccaaaacggagttgactgattatggtctatagtcgatgggcgagggcgagtggacgcgagcgcgagcctcactcgatgcattcactaaacgccaacacccgccgattaggcgggggcgtgtctgtgcgagcgagcgaacgcgagcgctgcaacccgatttttttttttctagacaccgcgcctggccgagacgaggaacttagcgtaagggacaaggaggtggggcaggccgcgcagcggcgccccccgagcgaagcgagagaggggcggcccccgcagacccgtcgctaaatccgcagacgagagccaacgcgcgagtgtccgccctgtgcagctctttcatactgaaggttattctgtcctaaatccaaaacgttcccatggtcttaaatcatttgggaaaaactttgggatttggggcgttttcggggtgcattatccagtaccttccactcgactcaacgaaagtgattcacgattcaggtgttggaccaaacgtctcagttagaaatcatgttattgtctgctattcgatctagcagagaggggcatggaggttgaagtggggcaaaagggagcacatgagctgcttcagctcctgcagttgttgagcttgtggcgagaaagcaagcggcttagaggtcttcgcggacactgtcgtgggggctggctttgtagtcggcgccggcgttggagcagcagcagtagaagcttcgggtgttgacgtcgaggtagtcgtcgtagcttcaggagtcgaggggtgtgcgagccaagaactcaaaatatcgccaagatatccaccctccaaactctccgcgctctcataggtattaccggtcagccacacgtgctggtcactatcgatgttgaagcgcgtcacgttcatgaacgcagagtacgcgtccaggatctccgtcatgttgccgtagaactcgtccgccggcagcaggttcgtgaacggatacccagcgatgcccagcaacaccagctcgtagaacttgcgctgcgtcttgtcggcgatgctgtcgatgaagagccactcggcactcggagcctcgttcatcaacgagctcaccatctcgatcaccgtcgccgtctcggcctcacactccgccgccatactatcggggaagcccaccagtccgcacccgccgtagtagttgatcagctcgctggcaggagtcttgtgctccgggaacacacccacgtagctgtccgccagcacctggaacttggtgcccttcgactccactccccacgtcttcgccacgtacgccgaccacatctgcgcgcccagcgacccagcgctgtaaccgccgatcacgagctgctccgggtccgggtagttggccagcgcccacttcaacaccgccatcgtgttgttgtagccgttcatgtacatgccttggtcctggcccaggcactgcttgttgcccagcgcctggttgtacacgctctcgtagggctccaggtacttgttacccacgaacaggtcgcccgtgcagtacggcaggtacacgatgttgtagtcgttgaagacgttgccgtccagcgtgcggttcatgatgcccgagtccgtgacggacgccttggtagtgatgagcgagctcgcgcccagctggcactgcagcgcgaagtcgcacgtgtacttgtcgacgcaggcgccgccgccctggaagaagagcagcagcttcttcttgctcgcctccgccgcagggaacacctggaagaagtacgtcgagttggacgcgaacgtcgtcacgctgtccgtgtagtcgtcgaaggcgcagcgcgtgtcgcctcccgggtagatgagcacgctgccatcgtcggtggaggccgtgagcgagtcgatggcgcaggcgtcggagtcggtgacctcacaggtgcttgttccagcttgagtggcgaggactgggagtgccagcagcgcaatggcggccttggtaacgtgggataagtggaccatgctggttggggtgaagtggagcgtgaaggtaccagttgaactggtgggatccggtcgatggtgtgaactctcgacggaggattcaaaagtgaatttctcgtagcggcgcaaggcggaggtgtgacgagaccaaggcgtaagaaggagaacgtagggtcagggagttgtgcaagcatccaaatgtttctacaggctgcaacctccctcgtcgattggatctgctggagaccgcaagaccactgttgtaacgctacgcgcggcgagaagttcaggaggggtcaacgaacctgagatgttgcgcagtttctacaatcgatcttcgtccgattgacggattcaccgaggtccgagtccttgcgcttccagcgtgtgacagcattagtgatcgctttgaggttaacaacttctgctgcgtcggcgacgctgttgacgccgtcggcgcctgccttgaaggcgtctgcatgggtcgctggtcgtcgagcgtcgaagtctgaccaggatgtgcgtcttcacatcttttgggatcgaaatcgtcaattgttaccacttcaacttggctgcgctcgtgacttgggcctgtgcagatgacacccaacgaacctggagcagctccgagcacagagtggttcttcatggacatagttgctggagaaacccagcgcaagctcggtacggatacgaagctgatgcttttgggcatttctagataagtatacggatacttaagtaaggtttatgaatgtgaccactgcaacactcgattgatagtcgcttcattcatcgtggttatctgcgcacgagaagtggcctcctcttctcagcgctctctcaatctacgtagttcctgggttcattctcgagttggtacgccggctagtcgttgtagagcttcccgccgagagccgagttgtagtacgccccgtgaccagccatcggctccaccggccagtcgttctggaatcgtttcgccaggtcggggttagtgatgtacagacgaccaaagaccacaagatcggcggctccgctacgcacaactccctcggcagtgtcgcgcgtgtagttgttgttggccataacaacgcccttgaacgcagtcttggcgtcgaatgccgtcagcgtgcgggtcaagaaggtgttcccatcgtatcgtatcggcgttcgcctctcccctcacggcggcttcggtagcatgggcagcgaggacaactacgagatgttcacgtacatcatggagcaactgagcaagtacaagcttggatacctagcgactccgctctcctccactactccaacaagagctgacttgcggtagtcctcaacgatgctcgggatctcctctgtctccagcgcacgaggcgtttcgtagtcggatacgacgtagtcggtatcgcgcgtgtggccgctctcacagcgtaatgccgatgccaacacgatctcgcccttcttgttgaagctcgagtggccttgacgaccgatgtgccacatctgcatgaagatcttgccgcccttgttgtgaacacggtcgatcacgcgcttccagccttcagcacgagcgtcggtgtagcacgccgcgacatggtaccagccgtatccctgctccgacacggcggtgccttccgaaatgatgagaccagcacccgcgcgttgctcgtagtagagctcgttgttctccgatggcacgccgtcggcgttggcgcgaccgcgagtgagtgcgatgcggttcttcagctcgaggttgtcgcccagtttcagcggcgtgaagagcttgtagtcggcggtggggattattgtagcctgtcggtggtgcttgggagggagtgttggttggctgctgagtagaatgcaaaacgcagaatgagaactcaactcaaacatgacgtgagtcccatggatagaagttcgcgacatcgagtcgacacatttcttgactgcgattggtacgcgctgccttcatcttaatacatgtcgacaggaatgtcgagtaatcctagaggcccatagttctctgctattcctctttaggtgacttcatttccttcgccatccccttcatcttctgcagtcacctccaagacgcaagtgcgactcagttctgtaggcagcttcatcgggttaggagttcagcgtcatgccttgaaatccgtcgccgatgcgtgccgcacactaatagaaatcaaggtggttctccgtgggaacaaggcagcgctccaactccttcagcacatacgccgaatccaccgacatgaaccaggccgatgtagatgtataatcgtccgggttattcggatccagcacgtaatgacggcgaagtcgctcagacggatcggttctaaaatccgtgcacagcgcgaatgtttgcgttgcggccactcgccggaaatccatagtgatcctgtccatcaactgcgctcgatccatgcagaatagacgcatgctgcctccactcagagcgtactgttgtgccgccaactgcttcactgtcgctccgttccccatgtttgcgtatcctgccgcgtccaaccaagctcgattgagttgcgcgtattgctccaaaccgccgtaccgccaagcagggagcaccactaactgcgacggatcattctcttttcgatcgtactggtaggacgtcgctaagatatcaaacatcttaaggtgtctgctcattctgatctcgtattctgtgaatccgtcaaccaatacaagaagcccatcggtttttcggatccttgatatgttttcgaaaggcaggttgatagctcgctgtattgggatttttgtcgatccatcaggtagggtgacgctattcggaccattcagcagcacaaccgcttcacctcttccgttccctttcacacgacgaatcaccaataccttccggtgagcgacgcatgcaagatgaaccgccaacagcatcaagaagcacgatttgcctacgccatgagagcccagaatcacgactggcacgaagtcaagtgacgggatctgctgtttaatcactgtccacagcatttgctcctctttacggacgtaatagctcgacgggaactcaccaaaatcagcccagagcttgtgtagagtaggcgtatcgaccaatgtgccatccttcgcccgcaactgatcaagctgaaactcggcagaatcgatctgcacctccagcttctccataccggggacgagtgcatctaacgccttcgacgcgaccacgacgatcagcgggttgtttgagtcgccataggaaccgatctgctgtcctgtgtcgagcggggtgttgcttcggcgcgccgagtctgatgtgtagatggacaggtcgtgaatgtttgtgtcttttagcacgctggtggagttgttgataatgcgagttcggagaactgcgacctttgtcgaggtggttgcaagtaccgcctcgatatcgtcgatatcagcggcaggcggcaacaaagcgccttgctcgtcgacaagcctgtagtacacctccttggacatcgttggaatgaatttactgattgaaagaaaacccccgctgcctactgcacaacaactttcgttcaaccacgttgtagtttacgcccgttattggctgagtccgtgcgtaagcctttggatcaccatcgctccgagtttacgcaggacaagtctgcatggtggctgatgagcttcaatcctacctgccaactcgacctcattctccaacactttaccaacctctcaagccacaaactcgcgcaaccaacctcgtgcaccatgtccagcaacaacagcagcaagacggttcttgtcacgggcgccacgcgcggcctcggtctcaccttcgctcagtactacaccaaggctggatggaaggtcatcggcacggcgcgcaacgttgacaaggccaacgatgtgagtgtttcctgccttgaggtcttctcgccatcgtaccaactactaactcgatataccttgccgacagctcaaggcgctctcgccgttcaagattcttcagctggacacgagcgacgaggcctcgatcatcaccatggccaagcagctgaacggcgtccccatcgacctgctcatcaacaacgccggcatcctcgagccaggctcgtacgcgagcgtctccaaggactcgttcatgcgccactttgagatcaactcggtggggccgttcctcactacgcgcgcgctgcacgcgaacctcaagctggccgccgacgccaacggcctggccatcgtcgcgtccgtcacgagtctcctgggcagcatccaagcgaacctggacggcgcgctcggcaggccgctgcagaaggtctactacgacaaccacaagctgccgaatggcgagatctacagctaccgcgcgtccaaggccgcgctcaacatgatcaacgccaacctggccatgaacctgcaggaggacaagatcgtcgcggttgtgctgcagccgggctacgtcaagacggacctgacgcagcacaacggcgtggtgctgcccgaagattccatcgctggtatggccaatgtcatctcgggcctcacgctggacgacacggccaagttctttgacttccaaggaccggagttgccctggtagagcagagtaggcggcctgataacctgacctatgtcgagttcgtagaacgaggttgctctggtgccaagtgcagtgcattcttgcgctccaagtctccaacttcaatgttacttccgcgttacatcatttggttaagtagcgataatgtggtgcacccaaaatcccacatcagtatatcctgacgtccaagtgcgcattcactctgtcgatggcggacgcgtccatcgagtcgctggcgagcggcgccatcgccgccggctgcctgcaggccgtcatgagcatggtgcacccggagctggtgcgcttcgtggccttccagaaggagcgcgtggcgcgcagcgacgccgagcaggagcgcaacaacacgtcgcgccacgtgcgacggcggcgccccgagcccgacgccgacgccgagggcctgagccccgagcagcagacggacctgtccttccagctcaagtacctgcggcgccactggcacagccacctgcgctccttcgggctggacccggagctgcccgccgtggtgcagcgcgcgctgctgtataggaacaaggtctcgcaccagagccagctcacgctggcgcagtacgagaacgccatcgccacgttcgagaagctggcggacatcatcgagtgcaacgcgctcatccgccagcagattaaggagctcgtgaccaagctgctgtccttttcgcctctaggtaggaagcaggcggccgcggaggctgcagagcagccctcgaaccaggtagagagggagatcggggtgaaggaggccaagtccgggctcgtggacccggtgtcgatggagccgacaccccctccggcctctttggagcagattttacagcataactatctctacgacggagacgagaacgaagacccgctgtgggtggatctgaagctcattggcaatgattactttaaagaggggaactacacggaggctattgaggcgtactctcaggcgctggaggtggcgccgaaccagacagtgctgtttggcaacagagccatgtgttacttgaggttgaaggattttgagtgtgcgcgcgaagacgccgaggacgcgctggatgccgacaattacgagaacgtcaagtactacaggctgctgtctgaggcgatgatgggcatgaaggactacgatgaggctaaggagatctgtgctgaaggactcgagctggacccgaaagatgcgacgttgctcagtagacggcgcactgccgaggcgatgatccagaaagagaaggaggagtatgagaaggagaagaagaggaaagagcaagaggaacgagcaaacgttgtggctgcaaatgcagcagctgcagaggcggccgccaaagctgccccggaacaagcgaaacctggtaagaacaagagcaagaacaagaagaaaaacaaggccaagaatgcattgccggagattgagctggtgccgatgatcaactaccaggaagtgccagctaaatggatcgaggtccatacgcgtgggtctcgtcgccttgaaatgtaccaggcaggaatggagaatctcgtcgtagcggcgaaagcacttcttcagatcactgacagcattgggactccagctagagctttactgccgctcgatgacctggtgaaagagggcatgacgaatctccgcatagctggtgaggcaggcgtcgcagaggcgtggtttcgacttggtgtgctttacagcagcagcgtgcgcaagggtataccgcttacagctgatcctcacaagatgatggagtgctttcacaaggcagcctcgttgcgtccgtttatcagaccgcctggaaaccgtgtgttcccgcatcaaggtgtggctgaagcggagaacgagctgggcgtgtgctatcgcgacggaatcccggctcctgtcgtggaagctgatctgaaaaaggcattccactttttcctaaggtcagcagaacatgactaccccgtggggcagtacaatgtggctattgcgtattcgacaggtagcggaacgcctgttgacgcgtttgcagcacgaatgtggacatcgcgtgcagcacagcatggcctgcctgaagcgcagcagtacctagcgcagctattcgaaaagggctatggtgggagacgcgatgaaagccaagctcgagaatggtcaatgacggccagtcagaaccggatcacagatctgttgatgaagcatgattttgctgacgtgggcgtccatgttgtgggaggaggcgacattgcaaacaagttttcgaaaaatcctgccgtctcacagcgcggaaaggaagtctttcaggaattctacgacgcttacttggacgaaaaaggttacgacagcggcccggacttcagcgtcggtgtagatactgacgacgaagatgagatcaagatcacgaaggtcagctcgtacacacccagcactacatcttcatccgaccactttgggagagcgggaatttaccgaccacattctgcggttattgatgctgaaattcaagctcgcgcaaaggccggaggtattacagcttgcaagtaccttgcatcccagaaacttattgaaagtgcggagagactgctcgccactggtgacattaaaggcgccttgcgagatatgaagaaggcagacttgacgtgggaacgaccgaagagcgtatttacgactgccgtcggtccaaaagaattgctggccaaggttctcaaggaagctgctgtaagcttccagattaatccgagagatatcgacgccgcgtacgtgattggcaggtgggagatgatgagcgaccaagacatcattcttcactggaaacggtgcgtgaagatgcatccgaacgaagcttctttccacttttacctaggcaccgcgtatttgacgctcgagcgctacaatgatgccatggactcaattgaagccgcattagccatcgaaaagaaaccggattggctttactggttcgctgctccgatgatcggactgggtatgattgacccggcactgtctgtctacaaggaatacgtcgacagcaatccccccgacgagcgattcataccagacgcgtgctattctatcggagcgctgtacttcaagaagtacgacaatgccatggctactgtgtatcatgaactcgggcagatggcggagtcggttgctattcgctttcctgccttttatcctaaggttctgtttgacaccgcgaaggaatctctccgctctggcatgaagaagaacgggtacatggagtcgtccgtgattgcgagcgtcatggcccagaacatgatcgagtgcgaattctgcaagacaaagatcaagcctacccagttgttcagccacaagttgtccaagtgcccgcgccgtactgtcgtctgcgagctttgcgatgatcgtatggtcttcgatgctctgcaacctcaccgtcaatctcgccatgccgtcgcgggtaaaagcaaaaagaagaaaagcaagggaaagaagcgcgtccagacaaccgctccagatgccccggccccgcaacccatggttaagactgaggtcagcgtcacgaactccgctccgacgcaaagcagtaatctgcaagaattggctacgcccaagtttcatttcgctggcgccattctcgagatcacagaagcgaaaggcacctccaaccagacagtgctcacacttaagacagtccttgatcagcgctggacgctacgtgtaaatcacagctcgcctccggcaggatcaagtgcgctgtttgacgtatcgaaagccatcgaaggagccgctgcggacaactcaatcctggtgttttggcgtcgtcctcccccgctggaagccattgacagacgtgcgctcgctgtgcccatggaaggtgagatctacggccaggacgtggtgatttacatcttgacatgtacatcccaagcgcttggctttgagctgtgccagcttagacacaacaagtacatggagaacgggaccatgtgcgctgcttgcggcaatccagcgtatccgggtgagaagctgtcagcttgcggtgcttgcaaagcagtcaagtattgctcgcgagattgccagcgagtgcactggaagcgcatccatcgccacatgtgccagaacgccacgctgttgagtagctgtatcacgatgagtgaagacgtcactccagatgagagggctggccccagaaagcaggcagccgagcgccagcagcaatcaacaagcaaggagaagaatgctgctcccactaacgtcagacatgaggacgctgtctttgtcgatgacacactgaaaatcttggaggacattctgaaagataccaaggcgaagggcgatcactgtaacggtgaagacgtgatcgagtactgtatgctaccgccccgcgatccctcgcgacctgaagccatttcaggcagtgttcgtatgttccgacgatctgtcgccggcgcgaatgagtttgtggccgagatcgctgttggctacttgatgtcctcgcctactcttctacagcagcaagagctgcactacttctttcagatcccgccgcacaacccgctgaagctcaagtgcgacggaaccctggtgtacctggacacgtgcaccgtgcacacggacgacagatctgccagaggtttccgacttgtgatgcagatgccgctcgccacgtattcgcttcgcgcgatcgccgagctcctggactacctgctctcaaacaccaatctctacctgacgtgctagacgccaaccgttcgttacctgtggtgaaagaatcgcgaggcttcctaacaagaaaatacgactccagctatgcatgggtgcgtttaatggtgctcttgacattacgtttgctggcctgttgacctattttgcggcagtttttaaacatcctgcgtccttacaggtagctgttcgcgatcgtgttctgtgaatcgcgcacttcgtcttgcaatgacaggttcccactgggcaggatcgcagctttgcgaataatactggtagcagcatcgcggtcttgcacaagtgtcatgagcgttgacgagagatccacccgggactccatctggaagatcaccccgtccgcgctgacgtgtgagaagatggtaaagttgaagctgtacgtcttgccgatgaggtgctgcactaattgctcgtcgttgagaatgtgtgggaagatgttctcaatcgtcaggcgcgaaattctgagcgtcgtcgtgcccgtgcttttgaccacgtagaccgcttcatctcgatctcgtccagccaagctcgggtacgtcttggcagccccctccatggggaagagctgcagtcgatcagcgcgaaagtcaacttcggaatggaatcgtgacaggaagtcccattgctgcatgaacgtcttcaggccgatgaactcgggggtgatcatgtcttcggccaggaccgagcccacgaagtcctggatctcaattgttctcggatgtccgatgtccatggcgaagtatccgtgctgcagcatcttgtgatacgtggataccagcctcaaggccccggcttcagcgttgtggcgagccacgacccgcgacgcgcgcgccaacatcagcgtgcgttcccactcctcggtgcgccgtcgcctctcctcgtcccgagcgcgctccgaccgtcggtggagggccgcgcggtgcgccttcttggcgttggcgcagtttcgggatcgcacaacgcgtgggtcaaagcggcttcgaggctgagccatagctccgtgtggcacgccgtcctcctcctcatcgctgctgttccagggctcagtgttgagctgcgcgcggcgctgcgctgctcgtccagcgcacacgaacatggggtggggaagactcctggtaaaccaaaactgacggggggcgtccgtgaccaacgatgcagaaagacgctccaccggcagaaggcaaactgaacggccaggtcgttgttgccgtccagagctcgccggacgctggacgctgcaagtgtagctccatgcggacgagaatcctgcggcgctatagacaccacgcagcaaatttcttgggggcacgaacgcgctggagaagactcctgcttcgacttgaagctcgggtgcaatactcttcgttcctctagcgggccggcagggcttccgggcagctaggatgaattcatggtcgattggcgccgcgctgccgagtgtgcaacccgtcagccatgagagcggtctcaccctgcagtttctcgcgagcaggttgtgcccagagcgtgtagccacccctgctcgctataccacttgcaccaataccattccaggcagcggttgggctgagtcagcagcaccaaggtagagtacgtgtattgttgccttcttgcaagacgaccaatctccccatgacgaaaagctcacaaactcatcaactgcagattacccgacgagtgattacaaatccttgtcggctggcaatcacatgtacgcagatcgcaattgtctccactcgcctcacttgacaattttccccgtttaccacagaccccatgacccccaagaccgtcctcatcactggcagcactcgcggcatcggcctcgagttggccaagcactacacgaccgctgggtggaacgtcattggagtcgctcgcagcgccaacacagccgacaaggtgcgtctgtttccgcctccactcaagacaagaactgttctctaactccctttgtcttgtcttactgagcgtctgtagttgaaggcgctgtctccattcaaggtcgtgtcgttcgactgcaccgacgagacgtcgattgcccaggcggtgcaggagctcaagggggtccccattgacctcctgatcaacaatgcaggcatctacatggccggcagcctggagacgacgaccaaggacatgttcatgcggcagttcgaggtgaacacggtgggccccttcctcgtgacgcgcacgctgctaccgaacctcaagctcggcgccgagaagaacggcaaggacggagctctcgtggtgacggtgtcctcgcaaatgggcagtatcgggggcgaagcgttcgcagacaactacagctacggcgcgagtaaggcggcagtgaacatggtgaactcgagtctggcggctgacttgaagaaggacaacatcgctgcgatcgttgttcaccccggatacgtggtgacggacctgactggtggactgggcgacgtccgcacggacgagagtgtgcgagggatgacgagtgtgatcgagaaggtgacaatgaaggacaccggcaagttctaccacttcaaggggcgcgaaatgccctggtagagcggtgtagagcacgtcagcaagattaaattggaataaagcagcacacacatcattcattagccactaagctgagcggtagagtatatctcatactctgctctaccacggcaattcaggtccttggaagtcaaagaacttggccgtgtcgtccagggtgaggcccgagatgaccttggccataccagcgatggaatcttcgggcagcaccacgccgttgtgctgcgtcaggtccgtcttgacgtagcccggctgcagcacaaccgcgacgatcttgtcctcctgcaggttcatggccaggttggcgttgatcatgttgagcgcggccttggacgcgcggtagctgtagatctcgccattcggcagcttgtggttgtcgtagtagaccttctgcagcggcctgccgagcgcgccgtccaggttcgcttggatgctgcccaggagactcgtgacggacgcgacgatggccaggccgttggcgtcggcggccagcttgaggttcgcgtgcagcgcgcgcgtagtgaggaacggccccaccgagttgatctcaaagtggcgcatgaacgagtccttggagacgctcgcgtacgagcctggctcgaggatgccggcgttgttgatgagcaggtcgatggggacgccgttcagctgcttggccatggtgatgatcgaggcctcgtcgctcgtgtccagctgaagaatcttgaacggcgagagcgccttgagctgtcggcaaggtatatcgagttagtagttggtacgatggcgagaagacctcaaggcaggaaacactcacatcgttggccttgtcaacgttgcgcgccgtgccgatgaccttccatccagccttggtgtagtactgagcgaaggtgagaccgaggccgcgcgtggcgcccgtgacgagaaccgtcttgctgctgttgttgctcgacatggtgcacgaggttggttgcgcgagtttgtggcttgagaggttggtagagtgttggagaatgaggtcgagttggcaggtagggtgaagctcatcagccaccatgcagattacgcacggactcggccaatcagcgatcggaacggcgtaagcttcaacgtggttgagccggtacgcttacttacgcacgaatcgaggaggcccgaaggtttttagccagctgcgtcaagatcgtgatagcagggcgccgtggagagcagattacgagcaaggttcacttccgtacaacctgcacagtacatgtagccacgttctccgtacaaacaaaatatcacgaggttatcgggaacatccatttacgccaaaaacgttgacactacgtagaacacagtcactacaggtacacttagatcactacatcgttactcaaaccactcgacgctttggcgtcgccgcgaactcgaaaacgaagcccatcatggtttcgttcaggcggtgaacagctcttgcaggctgcttcacagcacgcccttcatcgatgacgctaatcatcgcagccttcgatcttgaaggaaaaggctccttcgcggcggcaaggtagtcgccgttgagcgatgcgaacgtgtccgcatacgccgctcgacgttgaattgatcgaggcaccgagatctccagcacttcaagctggtaagacattcggcagccgggatctctcaatctgtcagccaaaccagtgatcgcgtcggagccgttaatagtgagctttcggagcccccagttgtcgagtccttcgtgcgatgaaagaaccacgtcaaagtttgtaaggtgaagctcatcgagatgacggcaggcggctgccaccgcatcgagcgctaagctgcgatgcctgccactccaaaagatccccatcttgagcgagcgcagatttccaccgatcgatcttaacagtcccggcaccaagctggggtcttcaatctgaaagaattccagggacagacactgcaacccctgggagtgttggccccgatgaagtgactgaatatcacttgtagtgaagttgcgagttgtatcaccgagttcgagatcacaaactccatagccagggactatcacttcagcgcggtcccccattacgatagggtcataacgagcgcggaaggggcaagcacgagacagcacgaagctgttgttgtcaccactttcatctaatccacgaggtcggaggttcgtcccttccttgacgtcgatgaagccatacctggtgtagtcgatggagggtagcactttgttatcgctgtagcaacggaggcaacggtactggccgacaagtggatattggtgagccttgccgattgaacggatgaattggtggcttcactccacaacgcgtacgccaaccacccccagcgcacttcgtttagccacgggatacggtcgctgagaactcccatgttcaaggtcaacttctggattggcacggcctcagtaatcgcagataggaatccagcaggtcctgcacatgagctactcgaaaaagtcacctgcaagtctgaaagctgcccctgtcctgagagtcgagaggcacagggataaccctcaggtggttcgcaaagtgaacgaccacacactagcccactcaacaggaaaccagcactggatgtggcatctcccgttgcctccatgcccacaatctcgtccagactgactcggaaagccgccaaattcattcgagagagtgcagcggcaacattcgctcctccaggcgccgtaaaccttggcttcatcgtctccaccgtcattgcatccgagttcgggggctggtgctcccacgctttcatcaacttagcgctatcagatacagcgcacagctgaacaaccgctgggacatccacatccagcagtgatccaaatgtccgcgagaaagaatccaccgatgatgctgccaccttgcaactcgctgcgttttggacacctttcgtcggaatggccacgtgctccgccgtccactcgataacgttgcacccttcgccccactccgccgtcgcctgtcgccccatgaaatcacacagcacccccgtcacttgacgtcgcatgtcctctaacctctgcatccccgcgcagaactcagtcgaatactccctcgggtcatccgaacatccaaaaagagccccccacgacaccgtcgccccctccgagaccacatcctccgaccccaccgtccccaccaagtagcactcccacactgggaacacgaacatgaagtccggcgtgtacagatcgtcgaagttgtcggcgaccaccacaaagtccgccagcaactgcagaaacgccggtcgactcaccgtcgccagcacgttgaagagctccatggcctctcgaatccgctgcaacttcccccccatcacgtcgactggcagggaacgggatcgggatcgagcatctacccgctaactgctcgtagcccttgggcagcgacggccagcaccgcagcgaagcgtgcactggcaagttggaggctcgaaactcgggcgagtccacgacgtcgagttgtggtgcagcgctttgcactcgccgagaacttctcgccacggctgcaggaacgcaaacttgtgcttgtccgccatcgcgaatgttgtcaaatgtgcggtggagagagcgtcttcgaactgaggagccgcacatcgcccatgcgcttgcatttcaccgtatggagcccgtcctcaagttgacatcgacacgctgcattagagcgacattcgcgtaacatttacaatgaaattgcttgagatggctacatttgcattagaaaacaatcgtattgtgagcatccctcagatgcagtgaattattccttagctcgtttagcttgcatccccccccgcgcgctcttggagttaacggaaaaattggcgctggttgggaatcggttcgcaattcatcgggatcggtgccgcttccatttcgggggtattatccatcgtggcaacttcaccaccacgccatggcggatgttggcgaggcagcgctggatgaacggatccgtctggacttgaccaaggaagacggcgacatacgccagttgactcacggtgttgggcgccacgcacaccttttcccaaactccaccgccgcgaccgccatgaagtcccttcacaaaggagtgggccgtgatctgcccgtcgggtcgaaaaagccaccacggatctgcgatatcggagaccgcgttcgtcatcccagtccagcaagaccgcagcgtagccccttggtttctcgtccgtcgccatacttcgcgggtttcttcgcttgtagaatttttccgattgaagagaactcacaatgtcactttacatcactcttactgttaaattttgctatgcattacaacgatgcagcgcaagggaaatcgatcgtgtagcgggatttcgggtcgacggtgtacttgcgcacgttcttctgcatctcgtcgcggtggtggcctgagaggcgctgcatgatccggtaggtgaattcgcgatcggctagaagctgggtatcgggcattttgcctatttgcgccaccatccacacggcgtccaatgcgccgaggaagcctcgacaggtgcccactccttcgtgccacacgggctcgagcaacgaatcgccaattaacccgacgtacagtttcttcccatgtgacgtgagaatacttgcggccttgtcggcacgggtgagcgagctgaagtcgaagatgctgacgcgcgcgaagtcggccttcctcggaatccccacaaagttgacgatatcgttaacgaacaagtgaaaggcgtcctggttgatgttgtccgctcgcaccaggtccttcgagttcggatgattcttcttcacgactctgcgcaccacgaggttatggcgctttggtgtcatcacgagatagtgcatctccccgcggaaatacacgatgttctccagatcgatccccacttcgcgcatcttgttgagcatcttgtgcttgagctcggtcgtccacgaaaactccttgactttggtctcctctagcgtctccaggttggggaagtagcagacgatccccagcgactccttttggcagaagacaaaccgctcaatccctgcaggctcagccagcgcattgttgacccctgacgcccccagaactgctgtaaattccgtttcttcgatgtgtggctccgttttaatggagtagggggataacccgttgtgtggagtcaactgaggggggacgatggcctcaaagtccgtcgctgtatgcacctccacccccacgagcagcgccactttgagcaggacaagctgcagttgccgtgtactcacgtggaagtacgtcctcgacttgcagaatttcgggaacaacacctttgcccccagtgccgccatatcctgaacaacccacggccacaagtggagcatattttcccgactgaacctggttcgcttctccagcaccgtcacgcgactaccaagcaaagccaactccacggctgcgcgcaaacccacgggacccgctcctacgatgcaaacgcgcttcgtggcagcgggtttctgcttgtagacgtccacgttaaagcgcgcgtccaacaacttgaagagatgcttcttgcggaagcccaacttgctgtacacggctgccttgatacgaaagtagaggtgccacggctcctccagcttcaccccatcaagcctgcagtctctcaacaaatccttgaaagctgccaacgtgtcgcctaaatctgttgctgagacgaaagccttgaaagtgctgcgtactgtggaagacacatttgctcgagggtatgagaacatgggggcgttgactcgattgcccccggatgcgtccaatctgtctcgacaatggaagtcgtagtcgctcgcttcactggtgccctgcgtactcgatagccgacgagaccgccctttgatctggagggtatcagtgcccgtgtcctcccgcatgatctcaaggatcgagaccaagtgcgacctaagccgcgcaacgcacagctcagagagatcagtgcgttggcaggctagagtgatctgccccagcatagccagcagtgacagttgattcccggacggcggagctgactgggtttgtcgaagttgtgatccattattgctccccactccagtgacgaatgctcgcgatggatacttcacgtcgggcattgatacttcctccctcccaactcgtactaaggagtccagcagtcggatgttgtcgtagccgctgactcgtactcgacgtgttgggggattgttcacggggtttgagactggtttcttgtgcgttgtggtcttggcttcttcctcgatcaggagctgtcgcaccttcagccacgccgtctccttccctcgctgcctccagttgtccgcctcctcctccgcgatcagactcagtcgacttgagtcagcctcgttgagtttgattggcgtcgcctgtacgctcgagtgctgccagattgtcagcgttgggtgttcgggacccggttcctcgccgctgaagatgtcacggtcgctgtcggtgcttccgtcgtcgctgtaaatgtcgtcgaggtatttctcaccgacgttgattgccaagctgtcgaggagttggcgacgtgagtcgtggtcgacctcagtatcgttgagatggtcgaaggtactggggccaatcagaccttcaccgatgtgatggtccatactcaacaaccacggacgggaggcttgcgttcgactgagcaaaagtaagaatgaagtcgtgggttggctgactgcgtgcaggcagcgaaagaaagtagaagaagatcgttgttgactcaaagaccttgagtcattgagcactagctgtgctggaacccatgcctaaggagctcacaatgtggtactcgcttctaacgttatgcatacagccttgcagtgagttcagagtcagactttgcgaggacagcctttgttaaaaagtctgcctaacttccccctgattgttggggcggaacagtcaagtcagaaagtggaccttcgagagtataaacgggtggatcaactacgatcgaactagttcattagttgaagggcgacagatgcaatgattcaactcttggcgcaaagttcttccagctactcgcagctaccttaggcacgccattgagatattatttcaaccaagaagaccagcgttgcgtctagatttcagtcaaaacttgctgcatttcgagtcaatccctagtgctgaacatcaacggacttgaggctttctcgcggttgcggcaggcagtcggcaacgcaactataagcaactagaacaccagaagtcagaacgagaacagagctctatttcgttgttacattcatattccgacctgtcggcaacatttgactgacgatcacagctagcctgcagccaacctgctctctctctttactggatgaaggtctcgtacttggccgggttccagtccgggaagtacttggccgccgtggccgccacctcctcctgcgtgcccacggcgccgcggccgtcctcgaagatggtcgtgaggaaggccatgaagtccgtgtcgaacttcttcttgttctcctcgaagtcgacgtagcgcacctcgatcttcttgttgagcttcttctcggcgagggcgcggatcggcatgggcgagaggcggtcggtctcgaagcggaagcgcgcgcccgccagctccgacttgggcgtcgtcgacagcacgtgcgccgcgaagcgagccaagtccctgcgcgccgtgatgctgaagggcgtctcgcccttgcggaccaccgtcatgtagccctcggcgtagtgatagccgaagtacatggccaggaactcggcgaagacgcccgagttgaaggtggcgaagggcaggtcgtgctgcttgagcgcgtcctgtacctccttcttgacggcgttagggccctcggccacgggcacgccgtactcggtgggcacgaagagctacacgccggcctccttggccgcgggcacgatggccttctgcacgtgcatctggaagcccgacagggcgctcacggccacctcgctgccgcccagcgcgcgcttgatggactcgtggtcgtcgtacgagacctggaggagcgtggcgccgcgggccttgaacgcctgcagctccggcttggactcgtcgcgcgtgaggatggagaccgagacggtgtcgcccttgttgagcagctcgtccacgatgtcgccgccgacgccgccggctccgatgatggcgaacttggtgtagaccgacatgactgggtagttgagttggttgcgtgtgctggacttgtgtcgtgcgaggagttttgaggaatggacgctgaaagatattttgcaacgggccgcttgcatctttgattaatctcttgtaagtttccaggaccatggcgttatgcggcagataggattgattagagaatcaaagggaactagtaatcgccaaccgattgcggtgaggacgatctaatcatccacatggatatccaagatatcagtcgaatttaatcctttgcccgaagtgagaaacgttttctttcgttctcaataaacggataagcgtataattgttgtaaagcttcttgaaattctcagcatccgttttcatgagctagacgtcagtgctgttggcagtcttcggcttcgcagggcagtaacttaccagtaccaacgcatcgtacatacacaagacacatgaagatgcgtttgttctacaaatcgctttgcaccattgttcacaggattgctataacgcgaaacaagatgacaccaaagagataagcgccatgaagtaccgtcatttaagtgcatgctgttgtaggtggatgatggtcttgttggcaccaacggtgttaattgcttatattgaacacgtgttcccggctctcgtgctgaagagaccgtgaaaatctacatgtatagtgaaccaagtccacactcgcgatacacaagagtaatcaaccataggttttcttgatccgcgcattatctccgacaaaccctacaaggccatgtatatcattctccggatatttatcactacatgtactgaccttgatttcgtcgtaatttatcgctagtaaccttgaagtcaaatattgaccaatcagatgcaatcgagcctaatcagctattctaccatgttggcgcactctaccatgttgcaccagcgcggcttgcgccatgagcactctaccaagttacactgtgagctggctaccatattacactgcgagcactttaccatagtgatactaaattgcgagctgcctagtctaccatgttacactgcctacggtaattagtctgacgatactatttttgattgaagttcattgctcttagacaataaatagtctgacctagactatatttttgctaagactacttatgaagcaacacatcttaccgtactcagagttttcaccgacttaccttcgaagtgctcgcggtatttcgcgataataccttgaagatgcgggtagagctggccaaccgaccaggtactatcgattccaagtgaaagtccacatcgaatcatcgccttgcgcgcataggacatgccatttttgtccttttgaagctgtaggaaaaacttttcccctggattttgaaccacaaacaacagcaaaacttgcaaaggagaaaaaggtgtaatgggtcagtcgtggtgattagagccttgcgcccttacccgcatggcacgcgagagactaattttgaagttgaagtggtcagactaattatgaattctacattttgaccagtacaataaatagtctgaccaagactattttcgaacatagactatttccgcacacagactaattaccgtaggcagtgtacactgtgagctatctaccattctgcctaccatattatactgcgttcaccctaccacgttgcgctaggagctatccaccatattacactgtagttgcctaccatgttgcaatgcgaatactctaccatgttacattgcgggctgtacgttacaccgtgaaaatctaacgtgttgcaacgtgagcgctccaccatgttgtaacacaagcactctaccgtggtgcactggacgcctaccaaaaatagagaaatcaccaacatagatacagcagatattcacaggtcgaagacctgtgcttggccccgacaaaacacctgtaactttccaaaaccgggtaccaaaccgggtctctctttcttaattgtaatgtttaagctaatatctgcttgaatcgggtatccgtcgataaatgctaagatttatgcacattatttaccaaaggttgatattaatcgtttattattgaccaaaacctgcattcaaacacttacggacgctccagcacactatgagagcgtcatggcttcgctgaaggcgaatcaatttgcgccataatcgaccaagcttagctgaagatgaacaacatgacttgtctagctgcaggctgcatttttttacatgtcaattcgctcaatacccaatcactccaacctcgtgtctgtcgtcaaaccaatcagctcaactcgacagtgacacgagcatcgttcgtttgaacaagactttttcccctgcgttgaagcacccacttccaaggaattgacccattagcgtatatctcattccgcaatttatccccaagccctcaagttaaaagtttgtttgtttgttttgtttttgaattgaggatcattattgtcacttagctaacatcctcaagttaaatggtcaagatcagcgcaccatgcgcctctccttcgttccgctactgtacttaagtagttctctcgtctgatcgttagcacacaacatagtacaaaaatgagcacggtataccttacttgcaaaatgaatgaaatagctctctcgttgctggcgccaacgcagccattggacgctgaccaggtgttatgtcaccgatggcctcatcagaccaggcaacctcaattggtgacttttggttcctgagaacccaccacgataaagaagagcggggcttgctggttaccagcctcacaaaggtttggctgaaacatcatttccgtgtcgatacacttcgatgtgcgcagctatttgttcaattacgcattctcgggcagatgctgcgcctgcttcgcagccgcagtagatgccctaggcaacccggagcgttgctccgggagggtacacaggtcgacgaatagtttcatggacgatgataacggataataattgagtaaatcccaaagttgttttgtttttaatccttaaaagcactaccagcccaactctctagttgattctaacgtgggaggcatcaatcttgtgagacgtaaaaatcgtctcgataaacagccttacccctaggtttatttcgtgtagccatcttagattttaatgctgaaatttgtatagaatatgtagaccatcactctgcacatgtcgctaccatatatcaccgacataactcattccgtgcgccaccagcttcaacctctcactttcgaaaaatcgtcgctgggtgacaagtgcccggcagcgctgcgtgcagcaacaacgaagacaggtaagcgtctacttaatacgttggctagcgagcaagtcgagtctattctaacttctctaacgtgcacagcaaccatggttcatctcgtccactccgccgtgcactggagcattgtggacacgtcgagtgacgacgagaatgtgccgcccaacttgcagcgcggcggcgtccatgcgccggcggagagcgccaagtcttcttcacccgccagtaccagctccactgggacctcgacgccgccgtggatggcaccgcagcgcggccttcgcgtgccaaaggaggtttcaaaccctccgcctgcgaagccttcgacggctggcgccgcagcgtccacgccgcccacgacggatcctcgcccaccagctaccccgccagtcacgagaaacccacgcagtccgactacgtcgtcgcccgtcctgcttgaagacccgcctgcttcgcgcccacagtctccctcgccggtcctgcctgaagctgcgtcacctccacgaactcccgacccatcacctcgacggccgcttcgcgagcgtcacagttctcggagggagcgtcgagcggtcgccgctccgtatcaacgccgttctacatcgccgacggtgtcgcccaacgctgtcatgcgtgcaacccgtgggtcccgtgctgctgttgggctacgtgctgcccgacctcgtactgttcgacgccagcagcaaggtcgattcgttcctgcacggtggccatttgcagtggtgcaccttcgcgaacagtttaacccaacaggggttatctttcctgcggttcctcattttggctggtgcggctgtgtggacccatgtcgcgttgggcgctgccgtaactcgctcatgcagctgtactgcaacgttaattgctgcccgtacggcggcaactgtggtaacggcctggtcgagtcgacgaaggtcgcgttggtgaggaacgcggcgacccgcgaattggccgtggtggcgcaagagttcattgatgcgggcgaggtactgggtgaatacctgggcgagctcgatcacgtgagcgtctcgcacgcggctcgaccgcgcaacgagggctaccgcctgatcatgacgcaacggcccgagaggccgagccacccagtccgcgtcgccatcaacgctcggcacaggtggcttgatgcgcttcgtcaaccactcgtgcgcgccggtggctcagttcctggaagtggcgaatggacgcaggacgactgtcgtgattgccacgacgcacgccgtgtacgagggcgacgagatcaccgtcgactacgggaccgacctgtggttcgtatgtcgctgtggccaccccaattgccgccatcgcgacatccaagatcaacaggacccgtaggcgtgacgcgcgtgtcgagggcagtttgcagacgtgaggaagatagtgggagcttggcatcattggtaagcctggtgtttgtatgctgtattcatgttaatctgatcctgtcgttcaagctgactgcgttgaagctaccttaggggctagtgtgctttgataccgctgttgccgtgtcagcggagagaccttggctccaaaatgaacgcgctctactaactgcaagcgcgctcagcttgcgcgcgaattcaccctgcaggttagtcctcacgaccatccggttcgaggcgagatgggctggcctcgtttgggcctcacccgccagagcggagaccaagctaaggtggctttcattcctggctttaccaagcctgcagcgagtcacctcctccgcaccttcgagctcccgtccgacatcattcctggtacgctacacgcctgtggataccatattctctgcgtactgtaacttacgtgttcgtgttttctgtatagatgccgaagcagaccggaagcactaactacaagctctctgcagtgcgtcggctcgtggcgctcgtcgagcactacctgccgctcggcaaggacgagtgggagcgacttgccgttgcttacaactccaaccgagggcgtggtgtcactgagcgcgactatgaaagtctgcgccgtaagttcaaggtgctctacggagcacggaagcctaccggtgtagctgacatgccgccgcacgtgaagcaggcgaagctgcttaaacaggccatcgacgccaaggccagcgtggtcgacatggacgatggcgctgatgtcgacaatgaagttgaggaagagggcgtgaatgaggaggagggggaggagtatgaagtcgacttgtgcttcgacttcgacggcgatgaggggctcgatgacaactcgcgcgcgagcgacgacgcggacacgagcgagagagcctccaccagcgactccatgcattctggcgagacgcagacatcagccggggacaacaccaacatgaacagcggcgacttctcggagttgctgccctcgaccggtgtttgcgaggggttagaggcttttgctacgccgcggccgtctccgccggctgcgcagccgacgcagagaaagttgcgatcttctacaacaaagaagacgggtcgaggcccgagtgcgatgggggtggcggccgctgccgcgtccacagcaaccacagacggtgataatgtggcgagtgcttctcaaccagccaccgctggacgttcgcaaggcaagaagtcactgaagcagaagcgctacgcgacttcctccaacagacttggtggtatcaacttggctgagctccgcgataccgtgggacgcaagcgtgctgcggatgaggacgaagagctggctgaggctagctacgccaaagtaaagcgcgtgaaggctgtgagggcgacgacagagctgacgaagcgcttgtccgatctggagagtagctccagcaacatggggggcaccatgttcgagatgctgctcatgatgcgtgaggaaaacgagcgcaaggcggaactttgccgtgctgacgaagagcagcaccgtcgcgatgagcaggcggcccgcgaggcacgctacctcgttgacaaagcagaggccgaagagcgtagccgtcttgagaagcaggaggcggtggagcgtcgccgtcaagagaaggaggaggcggaggagcgcgcccgtcgggacaaggaggacgctcgtgcgtgcactcaagagctgttgctcatcctgggcgcgctaacgaagaaggaatgagctgtgagtgcccttgcgcggtgaaggcaacagcgaggaagatctaaagagggaggaagtgcatttagtagcgtaacatctcaatacagccctttgtagcgatgatcaaagcaacacagtccatttacgagctcgaatctcgtgctgtatttgttagcagccccgccgatgccttcaacgatagctgtgcagtacgataactatgaaatcaactacgaagctttgtattgaaccatctttacgcaaaagcaatcatagagattcgaacatgtcttggtttggcatctccatgacgcccgcgaacgtggtcttgatctcggagatgccaaccgcgcgaactctgtagttcaccatcctgaataggttgttgagtcgcattcctcgtagatccgggtcgtagggcagcggcaaattgaggcgactgtaaactttctggacactgcccattccccattcggcagcctgtcgaatggaggtgatcgcattgtgcagtgtgcgtgcggcgctgcggaggcaaggctcaatgcgctcgatgtccccgtccttcaagggggtcaggatcttccctgtcatggctgtagagcagggaaatgcagagtccgacactacattcatgcgttcgtcggggcacaactgggggtccgtgagcttgttgcggaactccaaggacgtgtccgagtcgttccacgaccccggacagttgtgcttcgaccaaatgatgcagccgtcagcggcaaaacaaatcgtaccggtcacgaagaccgagtgtagccagccattgtacatggcattttgtaggccagcgttacagggctgctggacctgtgcacccacatcacaatcgaattcagttagttgagatatcctaaaagccgttaataccaatatcatatacagtacacgtacacgtaagtttttaccgtcgatgaacccgaacgtgtgggtcagcagcggttcgcgcttgttgaccatgcgtgccagctccgcctgacgcaagggagagggccaggagatgcgtgcaggtgcgtagccagtcagcgctagcgacagcgcttcctctgccctgcgcagcgttcgtgatagagtgctcggcggcaccccgaacatgatgcacagcgagctctgttccatagatcccacgtagaagctcagtacgagccccagcacctggtgtagatagcgcagctttggggggcggcctcgtgatgacggaggagggaggacgtagaagctagcaaacctagacagcaactgatgaaaagcccttctacagacatggaggctatagtgttaacgcaggaaaccgcgtcaaaaatgacgatgctcgaggaagacgaaggcatgctgctgctcctgtgcgaggccttcaaggcgcacaacgagcgcgtgcgcgacgctcaccgcgaagctgatgctggaggaggaatggcgcatcgccatgcgcacgcgccattacctgactacacggtgtctcgatgcaccgtgtgagtccgcatggatgaccctctacaaacgagtttaacctgcttaaactcgttgcgttcagaaaattcacatcagagccgtgcatgtagagggtcatccatgcggactgtcatatctgctgcatctatgttgggtgatttctctatgtttggtaggcgtccactgtgagctgctgcctaccatattacactgcgagtgcctaccatgttatactggagctacctactgtgctacattgcacttaacgctgactccgcagcgtaactaaactcaaccggtgacctgctcctgctcgtctgctcagcaagctccggcagcagcggttactattttgcatgacgatactcgtgtagaagtgcacatcgcgaggctccgtcgcacaccaccaggtctgtgctcataagtcgcaaccacgcacactttggcgcgggtcttttcataacgaggcgagttttatacacgagctcgggctctttgtagtcgttgtaacctactagcagacacagtggagacgcgctataagcaaggaggcgagcgttaagggccttcggctacccgcccaggcaaaaaagcccaatatatatcaagtgaggctcattctcgttgatcagggctggagtcttggtcaaggctagagataactgacgctcgatgccacaggcctaacatggtgtgcaatgtaaacggtagctcgaactgtaatatggtaggcggatcatagtataacatggtaggcaacttgcagtgtaaaatgctagacagctcacagcgcaacacagtagagcactcatgttgcaacatggtagtgcaacatggtagggagctcacatgcatcctggtaggcaacttgtagtgtaacttggtagcaactcacggtgcagcatggcaggtagtagctcgctgtgtaatgtggtagaagctcacagtgcaacatggtagaatagctgattacctatgtggtcaaatattgatcgcagctctggttctctcttgattagtcaatatttgaattcaaggtcactagcgcaggggctaatgttaactcgaaaatgggtaatattgatattgatataatatcgagcaccttcggttttgatatgtaaaatattatgtgatattttgatgcctcgggaaaagtagcaatattaatattactatattatatgatatattaagatctcattaagtacgaaatgatgacgttatctagtatttttggccaatcgttagctccattttgttagcgtcattatgaatatcaggttgatattaggttgatccggcaaaccattgacgcagcgtcacattctttgtgtactcaagcatgatgatagctaactatggagcaaatgctaaagctaccagtatttggtacgtttgaaccattgcaatactaacaagtattagaacaacgtattaacgagcacatggtaaccaaggtatctgattactcagaccgggtatttatttggatttggatacagctggcgctacccggtccaggattcagatacagatgtaattgcccattgggagcctggtgcccaggctggcggcttcttcaccaatgcgaacgggagaatatgtcgctgccgggacatttcctgtaggaggtgcagaaccggctgttcgtcgaccgcaacgaggtcatcggagctcgacactcgccgctgtggcgcgcggtgggtttcttcgccgccgcgctgcagccactcttttttttaaaaaataatatgtagtgacttataagtcgttgtcatcctagcaacttcacccccgcaattatcagtatcaaccgctggagccgtgggcttgatgcggtatcgtaaaaatatgaccgagatcacaccgatatcgccgccttaacccagcaccaggctaaggtgtgaaattagtaaggacaagaaaagggaacagtagctcgtaagatcaatgtttttcagctaagcatctagctgagtgatttatgattttgcaaaaaggacattgcgatttgtgtaagtattcaatttagcccagagcctaagtacgtttaggtacttagagtatattcacgaggcttatagcctgcgtcatatatttaactattttcgtagagaaagtcacgacgaataggtctgcgaatcgggaccttgcggtgcataagattccctaatatattagatgatatctcccactgcagtatctgatatcggagcaggacgtgcggttgttttcataccgattatcacaaacccagcatgtgcactagggacccacagggagattggacataatgggttacgtccgctgtctgcgactctacttatcttactcatcttttaagtgcgtcccgccgacttctattgctcttctcgcggggctgaggaagccgtttgtcagttgtagttagatctgcaattatccgagttcctataataatatgagccaatatgagatagtgcgtactgggcagtacctactggtccacttccaatgaatatattaacatcttacgaaagatcaagtcgtaaactgggtgcaactatctcgagacccataacagttgtcgaatatcaactctgcacattatcccaaagcatttcttacttcagtaatattgtgcttcaacttggaagcaataatacatgtcagcgtgcacgtttagatatcgagtgcatccaactcaaatatgagattcgtgggtaatatttttacgtggggtcgagctaacaaaatatcttacacgactgctagcacaagctctaggtgatgttcattgccatgctgagagaactcctaccggaggaagcacactccttagaggcaagaggcggaggtcttctggaaatatcatataaaatatttgatattcggtgagatttgaaatgataaatgaaatatcggattgatatcggggttgtctacctaatataatatttataccgaacattatcaatattatattcaaaaaaatcatcaataccaagttaacattagcccctgcactagcgataaagtacgacgaaatcagctgcttatgtggtcaaatcttgatcgcagctctggttctctcttgattagtcaatatttgaattcaaggtcactagcgataaattacgacgaaatcaaggtcagtagtgataaatatgatatcttggatatccatgtggatgattagatcgtcctcaccgcaatcggttggcgattactagtaccctttgattctctaatcaatcctatctgccgcataacgccatggtcctggaaacttacaagagattaatcaaagatgcaagcggcccgttgcaaaatatctttcagcgtccattcctcaaaactcctcgcacgacacaagtccagcacacgcaaccaactcaactacccagtcatgtcggtctacaccaagttcgccatcatcggagccggcggcgtcggcggcgacatcgtggacgagctgctcaacaagggcgacaccgtctcgtctccatcctcacgcgcgacgagtccaagccggagctgcaggcgttcaaggcccgcggcgccacgctcctccaggtctcgtacgacgaccacgagtccatcaagcgcgcgctgggcggcagcgaggtggccgtgagcgccctgtcgggcttccagatgcacgtgcagaaggccatcgtgcccgcggccaaggaggccggcgtgtagctcttcgtgcccaccgagtacggcgtgcccgtggccgagggccctaacgccgtcaagaaggaggtacaggacgcgctcaagcagcacgacctgcccttcgccaccttcaactcgggcgtcttcgccgagttcctggccatgtacttcggctaccactacgccgagggctacatgacggtggtccgcaagggcgagacgcccttcagcatcacggcgcgcagggacttggctcgcttcgcggcgcacgtgctgtcgacgacgcccaagtcggagctggcgggcgcgcgcttccgcttcgaggccgaccgcctctcgcccatgcagatccgcgccctcgccgagaagaagctcaacaagaagatcgaggtgcgctacgtcgacttcgaggagaacaagaagaagttcgacacggacttcatggccttcctcacgaccatcttcgaggacggccgcggcgccgtgggcacgcaggaggaggtggcggccacggcggccaagtacttcccggactggaacccggccaagtacgagaccttcatccagtaaagagagagagcaggttggctgcagggtagctgtgatcgtcagtcaaatgttgctgacaggtcggagatatgaatgcaacgccttcgttggatagacttgcatttcttttgagttcgtaaccacttttcgttcctgcagaggaagattatgcagtcgtgagtttttttaagggagcggtcaggttagcggtaaaactagtgccgtcggggtcattctcaatgaagcttcgctcttcgtacacttcactacgtttgccgttggagccatgccaaacaagaccgtcttgatcaccggcagtaaccgaggtctggggctctcgttcgcaaagtactacgccaaagcggggtgggacgtcattgcgacaactcgcaaaggagccaaccttgacgaggtgcgcacattcacttacgtagctccttaagatatattccgcgcgattttccttgacgtttgttttggtatgtgaccaagttgacggcgctgtcgcccttcaagatcatttccttggacgtgcgagatgagtcgtcggtgcttcagatggcccaagagctcgaggagatgctgatcgatcttgtcatcaacaacgctggcacgtttaccggcagtgggaacatgacgtcgaccaccaaggacgcgctcatgacggagtttgaagttcacgccgtaggtccgttccaagtgacgcgttcattgctgccaaacctgaagttgggggcgaagtggaatggcaagaacggggctctggtggcgcatttgccgtcggtctgggccagcatcgagactggcagcggtccgtacgcctacgcggcgtcaaaggcggccctgcacatgatcaaccaccgcatggctgacgagatgaagcgccaccacatcgctgcaattctgctggacccaggctagtcgccacaaacctgccgcgcagcagctacgaacgcgaggcggatcgagtcgtggccgccatggcgcgtatcatcgagaagtcgaagctgaatgacaccggcaagtttttccactttgaggggcacgagatcccgtggtgaagatgcttcgcttcgtagattttggatcttgagttgcttcaaaactcctcagttcgggttgtaggttccaagctactaacaaaaaaatgtaagaaatattcattcaagaaatgcgatgcagtcactgtgatgaactacaaactctgaccgcagtggcacatcatcaagacctcagcataacattagacctacggagtttatgcatgtctaggaaattcataatcgtagcagttgacctattcgcaaaagtggagagccgaccacagagtcattccgtcgaccgccaaccaagcccagcaatcatggccaacaagaccgtactcatcacagggagcaaccgcggactcggactcgctttcgcgaaacactacacgatcgccggctggaacgtcatcgcaacgacacgaaagggcagcaactccgagcacgtccgtccgaaaactctctcagtattgttgtgcatacgcattgatgctgacaacagttatgcctccgtattccgcgggttagctgagagcattatcgccatttaagacgtcactccttgacgttcaagacgaatccacagtactccaggccgccgagcaactcaaggacacccccatcgacttgctcatcaacaacgcaggcaccttcacaggaggaaacaccatggcttcaactgtaaagagcgacatggtgaaggagttcgaggtgcacgcggttgggcctcttttggtcacgcgcgcgttgctgccgaacctgaagcttgcggcaaaggctggcaacaaacccgcctttgtcgtgcaaatgtccacgatttacgccaatattgaaagtggtggcggcccgtatccctactgcacatcgaagactgcactgcacatggtcaaccatgttatggctgacgagctcaagcgtgacaacatcagcgcgattctgctcgacccgggcatggtgtacaccaatatgcccctgagcagctacgaagcggaagcgctcaagttgtcgcgaacgtgatcgaccaggcgacgatggaagacactggtaaaatgatggactacaacgaaacggtgctgccttggtaaatcgaagcatgcactgctaaacatccctagcaaagtgtaccaaggcaatactgacgggacatccgtactttgatagcattcatcgcagcagtctttgttttttatgaaatctacacatccatcaacacattttctcgtctagtctgtgctgttccggacgtagtacggctcctcctggaactcgggcgtgcagtaggggaacgtggtgtcgtcgtcgtccgggttgaagaggttcttgccggcgtagatcatgacgtagatgccgcagacggtgcaaatgacggcgacggcgacgcagagcagcttctcccaggcagggaccttggtccagaagaccatgaggtagaagatgatcggcaggatgagactcgacatggtgatggccgtggcgcccgtgaagtcgctgaggtcgaggaagtggtcgcgcagcaggatggagagcaccacgaggatcacgatgatggagatgcgcaggccgatgtagcggagcacgttggcgccgcccgtgtactcggacaggtcgtcctcgtcgtggtggtgggcggcaaccgacgcgcgggtgaggcggttgttgctctcgaggtcggcgggcgtcgacgagcgcatgtacgacgacatcttctcctcgatctcgatctcgccgtcgttggtgatggggtccgtcttgtgcatgccgaggatcacgcgctcgaagaggtagaaggccgggtgcaggaacgtcgagaaggccatcgacaggtgcagctgcatgaacaggtaggccatgatgacggcgccgcggtcggccacgaaaccaagagtggtggtggcgaacgggtccgaggtattggcgaccgagaagagcaggttgcccgacatctggcagccgcccacagcgtagccggcaatagccacagcgatgaagaaggccgacgcaatgcccaaactgaccatgatgacacggggcatgcgctcgggctgcgagtgctggcgctgcaggtcggggatcaccgtcgcagcggcgtacgcgagcgagaggttaccgaacgtggtgatgacctggtgcggggtgacgtcagcaagcggcggcgacgggtgtccgcgctcctcccagatgaggatggagatgccgatgacgtccgccacaatcgtgcccaggcaaccggccagggccatgccaccgctctccttcatggtcggaatcagagcgaccggcacgaccatgagcgccatgaacatgatccacacggactggctgaagctgtccgggaacagcacgtcgagcagcgaaccgcccaggacgaggaacgcgcagggcagcagcaggcacacgcccatctgcgagatcgtcaccgcccagcgaccaacccggccgccgacccattcacccaggtcagtgtacgtcttgaccgcagcgggggccgccatcattaccttggacagcaacacagacgagtagatgttggcgaacgccatgaagagcagcgcgatggtcgcgaacgtccagccggcgcgcgcgtagttggaaggcatgcccagcgagccgataccgcagacgcagcagaagatgttgaaggcggccttggaatcttcgagcgtgaagagcgcagtcgacggttggggagccatggtcgatgtggttagttggttgttcaccgacaaggcaaattggctaatgagctcttggtttggtttgatttggtttggtttgggtgtgccggtgccttgtcggcccctgcaccggcatgatcggacagctcaaagacacgttgtgcccatcgccattttacacaagctgtttccggtaaggcaacgcgtcctgggcctgcatggctggctgttcaggactgagtgccccctttgcgtaatatttttcaggttacttcgacgtgcacaaatgtccccaagaaaagttcacaatcgctcccaatcccatcctttaatttcggcgaggagatccggttctgattctgcctacaacgtcgaagttaaactgcagcagcttgaagaggccccaaaacgatccacgtgtgaagagatctcgtcgctggttggcaagccaagatcctccagctctcttgtcttatccctacgtacagtgtacagcgtacaattccaatgtgcagcaatgcctcacatctccagaatgccggattgtggctttttgggcaagttttcgtggtgaatggagaaccgtggactttctagactgcagactccacataaacagtctgctgggatgaggaaaagcgcgaactgtatagttctcgttgtgcttccagttcttcaccacggtggccttgaagtggccgaccgcaaggtgtttgtttaccttaaggcctccaagacctccatggggctcgataattcagttcacaactgtagcatcaccttgacgacttcgagatgcttcggccggcggcatgtggctgcctcatcacatgcaacgggatgcttttgtctgaaacagcgttaatcgagactgaaggatgggccgccaactgggatcaaaggctcgggatccacgacaattgggatccgattttggctcaacatttttgagcattcgtcccggtcgtccgcatctaatctaaacattcggagcgcaattgctcccaccaaatccttgttaaagcggtgcagaaccggcaaaacctccataacccgggcgttggggacacttccacgagttccacacgaaaattcggtccccacacctgtccccaagcggttctctgcgctggccgtcgtccggctcgctgcttcggccgcagagctccgccgtgttcaagctcgagggcgcgaacgaagacaaacgtccatcgaaacgctacatgacgaagacttcctcggagttctgcgttccacatctaagctgcctgtattaatagagcgtacagtagtgaagtctccacacctggaggtgttgccgatataatcgctccgattacagaggggatgtatggcgcctcgcaaatcaacgcgggaacgctgctgtagagccggcgtttgtcaacggcgtcgacacggagcatccccccaaaatgctgcaacagacctgctttcccgaatgcattgtgttgttgagcaggcctgcacgatcgcaatgaggatgccacggtgcaaacgaatcgtcgacacggaccaaccgcgaggtcgtacggtgggtggatcgacgcctgtatcatacatacaacagtgtctccgagcttgcgttctacaacaagcactgctgctagggtgtacagaattctgcccgaataaggaacgggtgtacaactgatagcctcacatatttaatattattttccagtcgatgtggcgatagggggatgtgcaaggtactgcaaggtactgaggtactaaggtgaaaaatccagtgccaatcatcagctctccaccctcgtttgaaaaatggcacgcatttagcgatcttactagacttcaaactacatgtaccgtagtggtagactcgcacttttgcttttgcacctcgccccacaagcccacctcctcccccactccacccatgaagtccacaccgtccaagcgtctccgtctcacttggtctgagaaagtgggcatcctcgacaaggtgaagggctagataatccctacgaggtcgaccagttgacagcgctgttgtggtgcgaggatgcctggtcaaaggttagtgcttcgaccatacgccactgttggaatcattccggactcgtaggtaaagctgctcttcagttcattttgaaataactaaatcagtacattggaaaagtatactcaacttaacatcaatttatatattctgcgtctttatatatatcaggcgttccttactcgggcagattactgtactgtacacactgaaactggtccggggttggtcaagttgatctcgggcagacacacaactgtgcgtgtacttcaatgtacgcaaaatcttcaagccggccacgctgtttgttccaacctgtgcctctaatctcgaccgggccgcatctatccagcgagagcaggacctacagcaaacacggcgaggtggcgttccatgcattcatagcttgaagcaaatgctcctgttgaacgagttatgtacacgtatccaagagctgactgcaacgtacattgctgtttgcgcagtgtacggtatcggtgttgtacagaaggccacgtggctgctgcatgatgcatgagcgtcgtcattttgctaaaggatcagttacggggggtgattttcactttgcgcttcaccaatttgtttgctcttgctgtatttcgatggtacccctcgaattacacccgataaagctgtacatgaccatcgaagaacgagtgtgtgtgtgtttggggggggggggcattttttgtttgtcgagatcgaacgggtcatttaagagttagccaaagcagaacaacactgacgcaaccagtaactgtgtcaacgtcgagcttgtaggtttatttcctcggtaagatttcgccgaaatgttcgctaggtgtctttattccgcatccactcgagctgaaaggtgaagtctgatcctggttgttgcaaaacacaccaccaacaacgttagattttgtacttcacttactgcaagaatcggtagaatacccaccaaaatgctccagagtgaacgtgagaatgaacgcggtccacacaaacatccgcccctgtacctgcatcgcgtgcgtctccaacacaaacgccaactgatgaaggatggagaacccaaatcgacgctggatcacgaggtacagcaccagcagtgacagcacctccagccacacgtaaagaccaatttgatcctcgatcgtggcactcgtggtggtgaattgatcttcactttcgtataatgatggcgccgtagacgcaaccggaataatcgacattgttgtctgcatcttggccgtattaaccggagtaattcggtgctggtaaaacggaacttgaaatttgccgagcccaacagtatttctcttcccattcgttggtggaacgaggtttctcgagctcttacgtgctggattctcggccttactgaatgaagcgactttggccagttctcgctgactgtccacggacagccgcactttcaatggagagcagagcggacgcgtagtcctgaagtcgcaaacgccgcacacgacgccactttcgggttttagcaagcctgtttcacctctgcgatgagctgcggctgctctcggttgaccagcaatttctgaacggtttgtgtgcttcggtaaatactacgaagcgacagtatagacgacagcgcatcgaagctgatgatcacgacggatgcgagtggtgacctcgccgtctgcatgcacgtggctgcgaacaacgcgtgggctaactcggctgagaacacaacgatccccgatacatattcttcgagaaatgacgagacggaggccacggcattcttgaacaccaacctaatgagcggcaatagagccacaaagacgatctgtgcgtggtcggatagcgacgcgaatgcggcgcttagtccggtgtagaagatcgcgatgttgccctgtgagacgacgacttggatcaacccttggagttgaccttttacgttcggagcattggcaatcgaacgagaagagacaggaacggaggcatcgtgagtacgaaggagaagggaaccgggtacgcccagaagttcgcgaacgccacagtgacgcacacgtggcaaagggaagtggccaaggagatcgccactagtttccagagataccgaccgacatccccttcatctggacggtcagccccacgccgactgtgaagctgatgactccaaagcgcagccaagccccgtagtttttctcccatccgtccgtcgggttttggagcggaatgagctcaagtgccacgaccagcaagagcgcgggtagcggagtgagtacgcacacggcaatcatccgagctcgagacacgcttcggctgtagtcatcaagcgcgtatatcctctctagcgagtacgtactgcgatgtccgatttgaagtcgattccatgagtgctttagccacttgataactccccctcgacatgcgctcccctcctctgtctttgacggatgagtgggccccgctttgactaccgcgtctcgctctacttgctccactggaacagagtgcatcatggcgaccagagttgagcagagttgaaagtctggacagctaattttaagtgagcggccatcgacgaacttgatgctcatttcgatcaaccaaaatcgtcaaacattttataggaatagaaagcgttgccaaaaatcactatgtgaaggaaactttaggaacacttgcacgagtttaagtgatcaccacggggctatgttatcaataattaagttacagttgttctgccttcgagctcagtacacgttctcttcagcgtcgtcaatatcggcggtgaccatgagctcaataggctccgcagtggccaaaagcttgagcctttcaatccgcgacgtcaagagcgggtgggtcgtgtcccccaggtagttccccctctcgtcgatcatccacgtgttgagtgccgagcgcatctgacagttgcgggacagtttccgctggaagcagtggatgcctccacgcgcgaatccgctctgtgccgccacttgatccgcctcgtgctccaagctccaggacaggtacaggttgcccccaatgactcccatcacgccgataacggcagcgaccagtttgttggggatcttgtgtatggcgaagcagctgccgaccagcgacgccggcaggaaggcgcctgtgagcatggcgtggttcttggcgatgtgcgcgctctcatgggccaatacgaagtcgatctcgtcgctcttcgggaggtcgtacttgtcctggatgtgggagggcgcgtagaacgcgtcgtagagttccatggttagaacgatgcacgccccacgctgaccgacagtgaggttggcgcccatcgaggccccggtagattcctccccgacacggatggagatccgctccgggttcttgacaccgacccgggccgcgattctccgcacgttgactgcgaacgggtcctggcggtcgagttcgtgggcgtccagaccttgagccagacgcagcgagtgcgggctcgtgggctccgcgatggggtacgccgcgtatccgtagagcagcagcgaggccgcgccgatgaagcgcttcgagtacgcagccgtcgacatgacttgggtaggttggtagggggtagagtgtgtggtgtgtggtggagttagttcactaatggtttgatacgcaaagagagaactttgcggtggtggcgagcgcttaagagttaatgcagtgcgtgtctctcgtagctcggttgaatatgcgactttgtatggtgcttgcctatgctgccgccgcccgcctttgctgccgatttccgtagatttgagcgtttagatttcactgccgacggatgaatggaggctctctgaatgctgagcaatctagaagcgttggagtggtgcttcttggtggatgtaagctaacgttagctggggcctgctaatagccgcacactgctgcaagaagatctcaattatgcacgcacaagcattatgttgacgcttcgcttgtgctccatggaacgttcggattggctgaaaagacgagttgtcgcaaatgtagccatttcggtggtctaaccatacattcctacaacttcaactcatgacgggaagtttgtatgggtctgcaaccaggctgccccaggctccacgccagggctttgatcctcggcttcgagctttggagacacatcagagggcagactacgacgcgatcgtatctgtcgcctcaatctgaccgcgttgcgctcctcctgcgtgtgtttgagcatgtcgccgctcgtgttgctccttttccagagcaaatccgccagcgtttggttccgtgcagctctcgagcgactggaaaggttcacggggtaccggtcgacgtccacttggggcgtgggggactcagtcgtcgttgagattggaaccacctccgtccgtggagacctcacagatcttatcgaagttttctcgcgctttgaaggaggcggttggtccaccacgtccgggtctttcgagttgctgcggatccggcggagaattgtgatcggagctttgtagtcgttgctgcggtgggtgcctctagtttttgatggtggtgaagaccgaggaattgcgacgagcgaggccttccgaggtgcttgggcttgatactcttctttcatgacggggttctggaatgatgcaactcgggggtctgaaggcgtaactacgtatcgttggtcgagcattggcgttgacgctacgcgtgaacttgtgcgagcttccggacgaccgctgttgcagttgggacatcgaccgccgtcccgatttctcaatgccttgacgtcttgctggagcttctccatgttcttcgccatagtttgtaccagctgaagcagcgattggtccgactggttatcttttactgctttcggcgaaggttcggatcccaagtcatccgtggacgttgcatcgtcggcactttcggtccgcgacgtgcggctagagaggcccctcccagagcgaaggctgccaccttggctcaagagaggcgaatcaagagacgaatcctcaataaattcctgatcaaagttctggaagccgtacttgatggactcgtccggcacgttaatgtcgatcgcctctaccaatatacgagcggcctctgctgcagtcatggttgcgaccgcagtgccacgagaaaaatcgttcttgccactctgtcggcgtttctccgccaccatctgtataatattctcccaagggaagggaatcacgttcttttcgatgcagctctccaacatggcagtgagaacgcgtcgacgatcttcagggtaccgagaaataatactctggaacaccttgcgactcaacacgcacatctccacaaacgtaatcgctcgaatgttggctgttcgcttgtagttcatgagcaaactcatctctccgaaagcttgccccgggtgtaaatactgtcgatatctcctcgattttttcgcctcggttccctccggataactcggtcgtcttccatgagcgttcctaaaccggcgtacatcggtgaagtcactgggttggccgcctatatccgcagtaaaccgactggagtttattgaggctccgaacatcccaccttcgaatatctcctgctcatcgtcgtcgtcagagcttaaatcctcgctgctatcgtcttcatcctcactaaactcatacatctccatcccagcttgatcatcctcatacactgcagacggcttggtcagcttgcagtagccacggttaatcatcatcatctcgcttccggtctctcttcgacgaaccacatagtcgtctggcatgtacacgcggacgtccagattcagcacgatctgcgtgaggaagtcgggcgtgcagtccttccagaacgggaccatgaccacgaggttcatgtgtttgtagagtccgatctcaatcccgagcgtgtgagtcaattcgtgctgaaacttgttgatattcccgtccagcgcctcgtactccacccacgcgtgcttgtagtactcgttcacgcgctctcggagtcggaggggcaggtccatcttctccatcgtttcatacacggcctccatcttgcggtggtagttggttttgttagcgttgaagttcgatacgagcatggcaacattaccgaaaactatcgcgaggatgacagaacccacgataatggctacacttgagaacaaattctcttcgtacgtgccaatgaggttcccttgaccctgaattagactcacagcgtagtagtagtccgcaacgtactgttcgcccacacttcgagactgacggtcttgagtgcaggaaacaacgtgccagaagcacgccatgtagtgtgcaatcagcagcacgagccacataagctgcgcaatacccaggagatgacaatagcgggagtaccgcagccactcgacaaagtggttagcgactctcataacgcgattcagcaacactcccctctcaatcacagccacccgcagtagttgcagcaccatgagcgcgatctggatcccgcgaaccgcatcgtggatatactctccagtggcagcgtaataacaaatctggactggaatggcaaggaaagcgtcgagtgcgaaccatgatcgaatgtacctctctgcaattttacgtcgtgatgtgaccaggttgccttgatccacgtacgcagtgttaaagttgaggagtacatccaacaggaagactgtttccagtatcatgacaattgttgctgtgtcctgggagccagtcgggtagtaactagcgaagaatggcaggtacagcagttgaaagtggtaggcgataagcatcagagctccgtgagcagtggaagcccagcttcttggcgtaattggggacgttagagctcgaaagacgctatttcttgtcttgacgctggtcatgtaccgtatcgaacgatggagcgagaaccgacgattgcgttggtacggagccccgatggccttgtcaatgacgacttcattagcgcgaccgaacttggacgggagacccaaactgtcggacatcttgcggaggttgaacttcttcatcatcgcgtcatggttcgcagctttctccgccattttgtacaggtttctggttgaggtctgtcgtttgagcacagccatcgcctttggtcgtttggacagtgcttgggggtgtttagcaaccggaggacggctggcagatgactgagaaggcaacgatcgcgctgacatcgtactcaaggttgacgagactcgaggaggatcggctaatagtagttgccgcagctcgctgggcatggcttctttttttgcaggtctttactcatttcatgggaagttgcattacttttttgcgatgcgtactatagtttagcagaaagcaggctttaaaaatgggttacctcgcctgttgaaacagcatttcgtctgcagcatcccatatctctgtcaggaatagctttgagtgccaaatggcatgacgcttctctaaaatttcataggcgtttttcatcttgctgcgcgagtccatgtatcgccaggttgtacgaagccttgccatttgggttttacgtcccgagcttattgaaagccaaactacccacaagcagagaacatggtttggtcttggcgtaaacgtgagttacggtgtcatttatttcgtgagtttcaccggaaacgcttacgttaaggagtgaacaaagtcatatcttcacgattttgctggtacatgttggggctggtacttataccgtcgtgggtcgtcaatgacgggctcgaagatttggcaacagcaataagttgttgctgttattaaataccacaatggtctataaatcgttctgcactgcgttttgctacgcaaagacgcagaatcgacgactgtagtaacccaagactggtcgaccgcatgcaagtgaagcggcaccaggtcggcaggactgaagtaattctgcactggagttgaagcgcattcaatcggatcccgagctcactgtcacaccagttataaagcctcgcatcattgcgtccactggaattggaaactaaaatctgttcctgctcgtagcatgaaaacaaaactcgctgttaattttcaggaatgaattggataaccaaacgatactctgcgtaccgaaatgccgaagggtgagagggaccgtgtatggaatccacacgaacagcctcccctgcacttggtatgcgtccgtttccagcataaacgccagttgtcgaagcattgataagccaaagcgacggcgaagaacgaaatgcagtagcaaaagcaacaatacttccaaccacacgtacacgaccaggttcccgactgccgagttcatcttttccagcgtcaggtctcgagtctgaggataatactcacgcgcgttgcctccgaagcgatacagcatctgcatgtacagtccgtagacaactgggatcacacatccaccagcactaggtactcgcaggaaaacatcgtctgtgctgtttcgcgtaccagctccacttgtttctcaattgcggcaataaaactggagcttttagcgttcagattagtggtaggttgtgcagacatttgtggttcggacttgatctctctaggcgaaccgattgggtttggatgcttcaagggcgcaatttgaagcgagcggacggaaaatctgcccaaaatgtttgtagcgacacccttctagtcgccttacgcaccaaacctaaaattcgttcatagcggcccatctcatcgatctttagtcgtaccgaaggagaaagtttcagttccagcggcgaacgaaggcgaaagttggagaatttgacggctgtggacgctaaaacctccggattttggcaagtctgcagcacagtcggcacaattcgatttgcctgctcttttggtcccaatgacccttgtagcgatgtaataattgttgcaccgtcttggtatctttgttcagtgtacgtatcgaagctattgagtgcatcgcgtcgaaacttatgatcacgaccgatgcaatcaacgacctggcagactgcatgcacgtggtcacgaacaacgcgtgcgctaactccacggaaaacacgacgatccctgccaccccctcttctagacgtgcagacacccacgccataaaattcttcaaaaataatttaacgaatggcaacagcaggacagtggcgatttgtccgtattctgacagggtggagaacgcagctatcagcacaatgtacgccatcgcgaggaagctcgggaaagttgccaccatcacatagcgctggaatttttgcgataactttgttgtagtggtggtgatccattgccgaccgacaattacgaaagtccaaaacactaaaaagaacacgaagtggggaagagtgagcaggaaactgaaaggaatcggaaatgtccacgagctcgcaatcagtagtgagaccgccacgaagcacgcggaagtgagcgatgagatcgtgatacattgccacagcgcgatagaaatccccagactcatgcccttcacttggaacgtcaaaccaagcgcgatcatgaaggtaagaaacgcataacgcaaccaagtaccgtagttcgccttccagcctgcagttgggtcttggagtgggatcatttcgtatactatcatcgtcaacagggctggaactggagtaagtatgcacaccatgataactcgaagccgagacgccttgtggcaatagctatccagagcgtgtagcctctcaacggagtacatgctcctgtgtccgacttgcgcagtcatccattgttgcttcaatagtttgaaccaccgctggagacgccctatgcatgatctattcaccggtaagtgtgcgtcttgacgaacagagccgttatcgttctgctctggcgtggacattctctctggcttcccgtctcgattcttgccgtgacaaacagttatagctaaactttaactcaacctcatatttatagacggaatatacaccaccacaccccaattcaagacatttagaggaatccgttctcgatgacgttctggtcctccagcacctccgtcgtcagcaacaagttcccatgcttggacattttagtggcctccaccattttcatggtcacgaacgggtcctgcagtaggtccaacaaggccgaggtgaggtcgaccttggactcgatctggaacacgcggccggttctcgcgtccacgtacgcgatcaaagtgaaggaaaagctgtacgtcttaccgatgagccactgcacgagctcctcgtcgttcaaaatgtgcgggtacacatgctcgatcgtcgtccgagagatctgcagcgtggtcgtcccataagttttgaccacattcacgaatttctgagcttcttcctcgtctccagcgccgaaatttgtatccacaaaagggtccacttcaattcttgacaattcacactcgatatctgcgtggtactcggacaaaagctgccactgctcgatgaattggtcgagtcccgtgtagtcgggacttttcagatcttcggcgaaagtcgctaacaggaaagttttggtagcttgagcttgcgtggggtatctcgcggggttgacccccctcttaatgtggtggaaatactcgttcattgtatggaacgcggcgtcttgggtcctcggtctcagttccaccgtccgctcgttcatgagcgtcaattgacgattcaattgttgaatttgttcctggagcttggccgccgcttgtttcgcctctttctccagtcgacgacgccgatttttggcgtttatctcggccttcttggcgttggcgcaatttttcgacttgcgcgggaggttccgagggcgtttggggccaattttgcgggttttgagcgggaaacttcgcgggttcaacgatgagtggttgcccggggatggtggctgcgttatgagccgcgcgtgcgggttcgtgagcaggaagaagtgcattatgcgcggggcagaagagctcggggacgtgcagggaagggaagatgcacagtttcgacttatgaactgtgaattttaggatagtggcaaattagatgataattagatgttgaagcgcagcgattggcggagaaggttgaagtggttgctcgtgtgcattgcacacgtcgagcggatatttgtggttgagtgaacgcaccggcgagaaacgtggggacaggcgtacagctccatctgaacaccacccaggagaccagcgaggggcgggggagacgcacattattgagcgggcggctgcgtccaaacactggcaacgatctcgactgctacgcgctgcagctgcatccctaaagcgaatagctgaatggttcagtgggaagcatcttccgggggctgctcctgtacatgtaccgcgtttgcaaacgcttgcaaatgcttactcaacgctgtcatttagcgcgccgtgcactgatgaagcttgaaagcacctctctaaggatgtcttctcccttcctgaagtcgacgccacacacttgttaaatcgccgtgtaaagtcaatggatctacacgtgtcgccgccacgtaagctgaatgaacttcagcacccgcacgaatccatatctgcaccctcccccctaccaatcccggcgaagcagcgttcaacctggccgccacggatacgcccagtcctctctgcatggacgactggcaacaacctcgcccccacggagagacgcgacccgcacaaggatgacgctagactgttcagcggtcctctgtcccttggcgggcgcgtatttcgcgccccactgccgctctcgctcattccggaatccgcccgccaccaactgagatcgtcgccatggatttcttctcgctctcgaacgcgcgctttctgcgtgacgctccacccctcaatggctccgtcatccgtccgtcctgcgcgttcctgcgtcgcgcagctctaatcggaccaaagcgtccaccaggtctccgtcgccatcgccgtctgcactccaagagctgcgccaatgccaagaaggacgcggccaatgaccgcaagcgccgacgcagacaggagctcgcttcagctcgagattccgagcagctgcaggcgcagatccgccacctggacgagcagctcacgctcatcaacgggcgcgacgtcgtggcgcgccagaacgcgcagggcgccgcgttcaacgtcatgcgcgtgtacttcgagcgcatcgtgcgcggcttcgaccccgtgcggtacccggagcaggcggacgcgccgctgcagttcttcaacgcggcgttcgtcaaggacctcaagaccaacgacttcacgggcagggacaagtacctggagcaatggcagctcgtcaacgagtgctacgcccgcgtcggctgcgaggccacgagcatcgacgtgtacccgctcacggacgagcgcttggccgacgacgacgaggagctcgagcgccacgtgaacgtggtggcgccacgacgctgcagatctctcggactacgatcgagcgcatcttcccgcacattctgtcggacgaggtgctggtgcagtcgctcatcggcaagacctacagcttcgccttcacgctcatcgcgtacgtggacgcgcgcgacggccgcatcttccagaccgagtccaccgtcgacctcacgtcggcgctgctcgacatgctgcaggaccccttcgtgaccatcaagatggtggacgccatgaccaagcgcggcaacctgctgctcatggacgacgtgctcgaggaccagaacgtcatcgagaacggcttcctctgagtcacaagcccaaggaaaccaacccaactgtatatgaagcgttgctgtcgtgaatgctgctcaattatcatgaaaaatggaccaattcctcacagaaatccatgctcaatgacgttttggtcctctcggacgtcttcacgcagtagcaggttcccgcgcttgttcatggtggtcgagttgaccatctgcacggtcacgaaagggtcttggagcaggtccatgagcgcggacgtgagatcgatcttggactcgagctggaagacgcgcccagttccgacgtccacgtacgcgatcaaagtgaagctgaagctgtaccgcttccccatgagcgactgcgccaacacctcgtcggccaggatgtgcgggaacacgctctcgatagtcgctcgcgagatctcgagcgtcgtgacgccgtgcgtcctcaccacctggacgtccctcccctctgcctgaagctgctcgtagtggtctaccagctccacgctgtcgagctggcacacgacgctcttgtggtacacggagagcagttcccactgcttcatgaggtgctcaatccccgtaaagtccggcgtcttgagcccttcatcgaacgtcgagaggaggaagttcctggtctccgctgcctgtcgaggggctccaatggggtcgtagcctcgcgccatgcagcggtaatacgtctccatgacccgcaacgccgctgcttgtgcgtgctgatgagtaactagcccccgtgcgttgaagagcgtgagccgtcggtccaattcgtggatctgctcctgaagtcgtcgggtctgtgcgagtccctctttgatcttgcggagccgcagcttcttggagttggcgcagttcttggactgcacgcgacggtgagcgtgaagggccttggtgcctactggcacaggcctcgccttcctgcgaggagagctcgacagcagccacttgctgaacatgacgaacgtcgtactatgagagacggtacgggaatggcccaccaagcatccgttactagacccatcgaaggaaggaaggatctcatgagatgcgaattggcgaacgactttaagtccattgatcatcgacgtctttcacgctacgtggacacgcactggtctctccttctggatgctgggggctctagccagctgcgggtaactatttggccagggggctaactgactcagacccactggttcttgacgatgtccaggcgaccatcgatcacggtcttccggtacgggaggtggcgtggagttgatgaaccttcagcgtcttcgtcgtcgctgtcgttgagaggcagcgcgttgacaagcagcaatcgctcatgactaccgcaagtcgtctcggcgaatccacactggctcggcttcctcttggtttgacgctcatcgagggaaaactctgagcgctggatctccttgcgtcgttcctcctccaagtcggtgacggaagacagcgagctcgatatgctggtgccggagaaagcgggagatcgcgaggtggcgcgtggacgcttgagatcgtggctctgtcgtggacttgaggcgcgatgtctggtcggtgttgtgtcggtcgcagcagacgccaccttggagcggttcctccaggccgtcagctcttgctgggcaagcgtgtagcatcctcgaagagttctcgctgcgctgttcgtggcttgacttctccactgcgtgaactggtgacgacggaccgcaaacactcgtcggcctccgtcgaagcgcagccttacgcgcttcttgccaagtgttgtcggccgatcagcgctaccctcttcctgctctcgctctacaaagctgtcgtctaacacgcatatctcgctgttgatacgagtcgcctccgctgtctctggcgcttcttcgctggttgccatgctcgacgcgcggttcctctgtcgcttcgaccgcgctagctccaccattgctcgcagcgctaccacggggcctaccatccgcatgctgaaggagtgttgccaccttggtcaacggaagggaagtgatgccgagcgcgaataaggatttcgaggaaaggacgcaatgctgaggacttggttgggggtcctcgcgagacaatgcacagcatggccagcctctctctgcagtcaggagcaagaagatgaaaggacgactacaatgacgtagataagcacgcacggatcaaaattccataatgagttggcgttacctgaagcgcagtagacatctacgcgagcattgctaggcgcttggcgcggatttccagtacgttcggtaaacgcagcgattcttcctcattgtcttctttgctggcagcttgatgagcagtcatttgatttcgtctctcagtttgaagagccttggcggtgccattcagagcttctacactcgcactgccactgcttgcgttacttgccacctcggggtccagttcgcgacgcacaccacgctgtcggagactctccttgctccgacgcagcccttcgtcgaattcctcagccgagatcgtgagtagcgatccgtccacctcctcgagaaacgccacgcttgacaccaagtgcgtgaaaaagtagccaggctctgacaccaacttgctcggactccggtactccaagatgtaggcgacgttccgcttgagctccgccgggttggcgcgtaacaccacgtagatcagcgcgggcaaaaattcgtccgcggacgggaaccggcctccgttctgcgacttgaggaagatcgtcagctcctggcacacgcgcagcacggcgtccatcttgcgtcgaggactggggcatagcgtcattgcttccaattggctcgacaaacgaagccatgtttgctcctgctcttcagtcttcggcacgggcagatctagatgcttgaaggtgacgaaacccagcaaactcaggcgttcatgcagcgcttcatcttgcagcgcaacttcgtcggacggagtcagcgtcttggcatacagcttctccatcaagaacgcctccagcacttcgtgcagcaggcccactccgtactcgtctctcacgtgcaggaacctgctctgtgactgcatctgcgtctgcacctgtaactcctcaccctcctcatctccacgcagcagcttcctgagcttgccactgtgcttgatctgctccacgagcttcttgacaaagtcctgcaccttcccgccgggtcgatctctggtcgcgatggctctcagcatgagcggcaggtcccagagctccgcgcgcttgacgaacgactggatacggtacaccagctcggccgcctgcgtgttcttcagcagcgccaccagctccctgaagcccaccagaaaggccatctcccggtcgtggcccgtcaacttcctcgtcctcgggctgtgcgagcgctgccactgatccagcagcgcctcctgctcgcgcagctcctggaacagcgtgcagtagcgtctggtagagttcggagcgtccgcagcggtctctgccgcctcttccgtgagctgcatgtcgttggccaagatcttgagcttgagctcgtccagactggcgaaaaacctgctcagctcctcgttgacgccctccagagcgtcacgacaatggctggggatggctgagactgctagagatccaggaaactcgctggaaccagctgaaagcgcctggtttcgtcgttcttcggctccgtcgatccaggagacgcggtttgtgcgggcagctagcaataactcgctccgccgctgctcagacagcacgtaggacggcgtggagagtacggttggagccgccgcgatctcagcgttttgggacgaccggcgagacgcgtccgcgtgccctgtagccgacgcattcgacggcttcgcgccgccgccaagaccccagaacatcattgtgctgcttgttgggactatggatacttttgatgataaggtatgagattccaagagtataatatttgagatcaccctccgcttaagtaactttaagtacgacacaccaaaggtatcgtattttccagcttgacgcgagcatcaagaccatggcgttcttcggcaagctcctgatcgctgtgggcgcgctcctgctggtgcacgcgggctactactcagtgcagtgtacgctcccgtccttcctctctctaacgcagtctctttccccgcatttaacgctgtattaaccgcgttattggcgctgcagatgagtcgtacgtgaagctggcggagacggccgacgcgcagatgccgcccttcgaggtgcgttttcgaccaatccgagatgagggaagcggattctggggtgaactgattgggtaaaaatctatttttgacacttgcaggtcgtcgtggaactcgtggcgtccttcctcatctcgctggtgggcgtgctgctcacgtctggggagattatgcccatccggtccaacgacgcgatgcactcgaggtgcggccttgaaactttggctgaaaacgaacaagttttgagctcaggagactaaaagtcatggttgttattgctgcaggtcgctggccaccgtcgtctcgagcccggacttctacgtgttcaaccaccgcggcaaggcgctgcacaagcgcattatttcatagagaggagacaagggtcaaggttggggacaatagctggaggagactttcttcgaggataccagcctgcaacacccagtcgacgcagacaaacaacatggctacgttagatgaagtgcactgctttcggtctcaatttcgtttctcctctcgtcgccttcttgccagtcaagaaagatgagtgtgcgggcagccctgatgtacggcatcgtcgagaacgtcgctaactccttgctgcaaccttgcttcaccccacgctcagcaatttctcacacgacacatcttacggtctgtgcgtgtcacaattagcaactggcctgaagttgtgtcgtggtgtcgaatgcgtcgagagtgtggagcgttaatctttggaaggcgaggggcatagctccaccggtcagtgctaaatccacggacgcggaactgaaggccagggcaatgggtctggcggcaagccacatggacgacgagtacgccaaattggcactgggactgggcgggcttaccggaaacacactgaagcagcaccagaactacaggttctaccaaacctacttggatggaatagccacgcaacagtagcggaggtatcgaaggtaacattagtgtgaagcaaaatcaacacgagataccgtgtcgccaatgcgatcttgaacttctacaaggcgttcttgcattccactcttttaaacggatactacgtagtatgaagttttggattggcaagtacttgcgtactcgctcccagagcaaaagtgagcagttctatttctccgtctcagttctgcgtggactgccgtattgacacgatgctctctactcggataacaggaactcggcagcaccatccagcaccttcaccacgtcgttgacgtgtgcctgaataacctccgcactgtcgtggaaggcgatgccgtccgccagacccgggaacgctgtgcctccgtagccatcgtagaatccagggccaaacaccacgtgcttgtaccagccacgatgtggtagaccagactccagcgtaaggtggcgctccaagtacatgagcttctcgttccagtagctgaggtcggatccaggttgcaactcgtccagcttttcgtgaaattcctggacgttggcgtcgaatttcgcaatagctcgacgtagctcggtgaagtcgacggtatcaactccatggtagcgctccgcttcgacctccaacgctgcctcgaacgacgtcacagcctcattcatcacgaacgcgtacgtagagaactcgaacggaaacacggcgttatctgcgagacgcagagccaggagcccccaccagcggccagttgtcacgtgcgagatgtagtccggatccgcgaacagctccgagtacatgatactgtccatggtgctgtggtaggtgccgtacgctccaggcaggttaaagccgatgttggcagacaccacgcctaagtggtggcagaaggctccaaagtcactcgcagtccccagcacagtcaggaggtggtctgggccgatggtgccgctggtggcgttgctgagacggtaggactccgtttgagcgagccactgctggtacagcgtcttctgttcgactgcaacgcccccgaaagcgttggctgggatggcgttcgcagtctggaagaggagcttggcgatcgatggcgacccaccggctcctgcaagagggcctagtgttgtgtcgacattgaggtaggcgatggcgtcgtctttcagctgctctgcgttctcctcgacgaactcggtgctgccgataagtccctgctcttcggcatcccacgacgcaaggacgatcgtgcgtttgggtctccatccagtcttcagcatctccccgaacacgcgtcctagctccacaagtaccgacgtgccgctgttggggtcgatggctccgcacacccacgcgtcacggtggttgcccaggatgacctgcttttccggctcctcagcgccctcaatagtgccgatgacgtcccaaatgggaccaattgagttgtccatttccaagtccaagttcaccaccgtggagccatcgtcaccaatgtggtagccatcagggaacgacaggcctccctgccagctcgcaggcgcttgttggcccttcaaggccttcagaatgtgcttcgtctggccgtatgacagcggcagcgacggcaagtgcgggatcgtcttgacatcttcatacttgaggtacttagcaccaagaaccgacgcccacccaggagtcaggggatctccacactcgttgtagattgacccacgctggaacgagttctccggccgccacggaccttcagggtacacggggcccttgctgtacccgtcatctaacggatcagagtagatcagcacccccgccatgccgtgttccagcgccgctagcaccttcaggcctcggtagttggtcccatagcgaaccagcgcgatcttccccttgaggtcgatcccttggtccaccagccactggaaatcctgctgcgtaccgtagttcgcgtacacgaccgacgccgtcatgttgcccgatggcgagtacgccaagaagggcggctctgcagtggcatccgtcgtacaggcgtctactgccactgagccctcggtcaaatccagctcctgggcggcttcttgcggctcgaggatggcgagacgacgacgcactggcgtggacagcagcgtgtagtactccttgatctccgtcttgatcccaaaggacttgagcttctccacagtgtacagcgccgtctcgtagtccgccttggagccggcaatgtgcggctggcgcgagtacacgtgaagatactcgcggatacgctcagcgtccaccccatcgacaagttgccgctccacgtcgttcagctccgtctcgagtgccacgctatggagcaacggactgtccccagcggcggctgaattcacgctctgcagcgtctggaagccgctggacgtctcgtacccggccactagcagcacaccagcgagccccgcgacgcgaaacagcgaagacttgagagacgaagtggatggaaggcttggcaatgcatcggcattcacttggcggccgtcgaaggtgccgtagatgtcgctggagtcgctgtccatgtgctgcggacgtcaacggagactttgctggacgcgcgcaaattcgggaatgacaagcgtatcttccgcacgaaaggatgcgtcgacatcataggtacactcatcatgggtacagccgggattgctcaacatggctacagtctagttgaagtgaaaagtacgaagtattctttgatacgtttatcttcataacccacagacggcatacacacgggcaattcctctcttccttaggcggcggtggcctgttggtgctgctggttctcgtggacttgcagctcgcgtcgcaggatcttgccggtggcgctcttggggatcgcgtcgatgaactcgacctggcgaaccttcttgaagggggcgaccttggaggccacaaagtccatcacgtcctcctccgtgagtcccgccgcgttcgtggggtccttgagcacgacgtaggccttggggatctcctcgccaaacgcgtccttccctcgcacgcagcaggcgtcggagatctgcgggtggtggttcagcacgtcctccagctcggccggcgccacctggtggcccttgtacttgatcagctccttgacgcggtcgacgatgaacacgaagccgtcctcgtcgatgaagccgatgtcaccggtacgcaagaaccggtcctcggtgaacacgctcttgttcgcctcggcgttgttcgtgtagcccaacatgacctgcggacccttgtacagcagctcgccgtgctcgcccacgcccagatccttgtcggtggctgtgcatttcacgcgaagctgggtgttcggcaacaagcgaccaacacttccctggatgtggcgaaatggtaaggtgttgtcagtaaactagccccagtaagtgctcaagtattcgaatcaatcactaaccggcttgcgatacgcatcttcagcgtagttgacagcaggagaagcttcggtcattccgtaggcttgcttcacagtgaccttcagtcggtccttgaccaacttctctacctccttgcccatcggcgcgccgccagacacgaggaattcggttgacgagatatcgtatttctcaaccagggggtggtgagcgaggaagagtgcaacaggcggggcaatgtgtgccgctcggatctacagagacgatgagcgattcgattagtcgtcattgcaacccgtcaagcattgtgcagcgccaataacgcaccttgtacttggacagcgcgttcaggaacgtctccggctcgaatcgcggcagcaccaccttggcagcgccttggtacaacgacaagtgcagcagcatcatgccgtagatgtggaagaacggcagtagtccgagcgagtatccgcccaaatcctcgacgtggtcgacttggaacgcgtttgacagaatgttcttcgcactcaatgcaacgccctgatgtacatccgtacagcaatgtcagtctgaagtcctcatggttcaacacgttcctaaaatcacattgagcccacccaccttggggacgccagtcgttccgctggagaacggcaggagcacgttgctctccgggtcgatcttctcgaactggaacgaggggtcgtcatgctggaccaggtcactacaaagcagcacaattagccaaagtttacccccaattcaaagaggctggagacgtactcgatgctggagagtccttcctccgtatctttgccgtgtcccatagtatagatcaacttcttctcaacgccgcacagctccgccgcttcaacagctgtcttctccagctccttgtgcgtgataatgtacctggccttggccgccttgatctgcaccgccagctcgtcgggcaggaacatgggcgacgcgggggagcacacggcgcccagcgacgtcagcgccagcaccgccgtggggtagtccaggcagttgaacgagtgcaagatcacggcgtcgcccttcttgacgccgtccttggcgagcgcgatggcgagcctcctggcgcgctcgtgcagctgctggaacgtgatgcgctcgtgcgtgaggccgtcgatgaaggccggcttgtccgcgtggacgctcagctggtcgctcacgatgtcccagatggtcttgtccgggatgtccacctccgggtgcggcgactcgtgcacgatcacggagaaggagcggaacgtgagcggagacgacgacgcagatagcggcccgggccgccgcaggatgcgcggggcggcggcgccactgcgcagactggagcgagcggacgcggcgcggagcagacggcgagcgagcattggtcggaggaggacaaaggggcgggatatggagcgacgtgggggctcgggggtgaattcgcgactgaaatgacgcacgtcgagcagtgcggcgacttgtccgagttgaacttggcgtgtcggttcgaatttgggccaatcggagcggagagattgagggtagattggtaaatattaggggtagatatgtagttttggcgtctgttaaacaggttgaagttgtcgtgatatcgttaatcagcgccgtttgcaaatcaatgtcaccgggacaaaccgccaaatgggactcggagcggtctcggcatctgcgaactggagcaatttggagcccggctggcaaaaaggcttcgtggtggctgagaccaaggggcgctggaggcgggcggtgtggtgtgagctgctggcgcaaatgacggcgtctgctttggaaaggagcatgatgctaagttgctagagtcggctccggcgggcaaatggatccaactgtgcaggggcatgtacagtgtacagtgtagccaccaggaagcagaagatgagcgaggcgggctcgtttagtgttagcgtcgcagtcgaggcacattgctaggaaggaaaaccaattctgaagtcgaacgcagatcccattgatgacatcgcctgggactcgtctagagtctcccagtgcattagtttccccaaccaaacaccaaacagcgataaagttcattgattacgcatggtagcagtgtacgtagaccacaccgaaaaggtctacgttgacgttgttgaagttgcactgttcccgcgcagtccatttgtgcaacgtacatctcattgctacatgaaggcgctcaagaacagagaagcaggtcatcttgggtgaccaccgcgatgcgtggttgtgtggatctattgacactaacagcggtgcactttggttttccttttctattatcataagcttaggtatgcgtagggtattttgtacggctctattctacgacggactccagctagctaactattagcctggcatggccccgcgacgctcagttggacatgaggtcgaggtcgttgccgatggcctccatggtgtccaggtagaaactgtcgagctcgtggtcgatgtcggtgaatttgtactcgtccatcaaggtctcgaactcgggcgggtgcttctggtcgcgaggcgtcattcgacgccgcgccgcggatgcaccgggccgagacgaagacccgataggagatggcgatggcagccaggacgaggagaacggcgtggacttgccaccaaagcactcatctaccaccgcagctgcagcagagcgtggggtcgtgccactggtgaagaaggagccccctccgaacggagacttgcgagcgctgataagaggcgtcgctgcaagctggtagagctcgtccccgtggccaccatcgctaccgtcgaggttggtctgttccaagaagtggctcaagccttcctgctcgatgctgctggtgcgaatgagtcgcgggtggtcgagtttcgagtcctgttcgtcgttcgactgcctgctgctgttgctggtggttgagctggcgttcgactgctgtgaggacgacatcaagggcatttcagcgagtcgcggagtcggaaggtcaaggaaagtatctgcgtagccccctgctccggtcagatcgaagtcctgtccccagagatgcctcgtgctcgtacatgaagcgtccacacggaaattggacggcgttcctacccccgggaaccctgaagagcctgaccccacgctgtaatcgagatcaaagtcatcaaacgtcgctgagccgcagttgagcttccggcgcggagtgcgcggcttcggttgatcgatatcaagcgccaggcagtgcgtcggtcgcttctttgatcctgctttcgtggtccttttcggccgagccttggtcttcttcgtggtggtggcggctaccgggtccggtgaggctaacgggaagtctccgtcgagagaagacgacatgagccgcgagaacgacggagactcgagctcgaagcaacctaatccactgaagagcatcgagggctgctgcagtgccagcgcgtccgcatcgctcatggcaatctgactgtccacgatcaagcccgaagacatcgtggcgaactgactgtgtcggtgcgcgttgcgctggtgagcgttcaaactcttctcgagggccgcagcactcagctgtgtggcatttcgtccgttcttcgagcttgttcgcgatgctccactgcgactccgactgccgcgtttggccgaactgctcctactgttgctgctcgacctgctattgctgttggacctgctgccgttattcgagtgggttcctgtggctgaagggggcagcgggtttccgttgcctatcggtcctccgagtcctgctgctgcggccatccgcctcttttgcaggttggcgacccactggtcccgaatcgcatttcctgtcgagggcttccccgcagcttcggtctccagcatctgactctgcgattcacacaatgtgagctattatctcccgagttatcccgtgatcaagctggagaacgcaccctgtgagcgacggaaatgggagacagcagaatcggcgcgggggccgtcgctccgtgaacatcgggcgtgctcttcgaagcacttggcggggcggtgaccatcgttattctgttttatcaagagcttgcttccgtttctttactcgtcgctcgacggctttcggtgcaactcaaaatacaagtggcagtccggcgcggcagatagacgatgagttcggatgtgagcgaggtcaacggggccgagtgcacagtgcaaagcgaggaactgctggcttgaggattccgatgggaagtttcgggtgtgcgccgtcccattggagcgctgctagtgaccatgagcgcaggcctcgtttcacacagggaggtgaacgaaacttgaaacgactcgatggaaaagtggcctcgtcgcgggcaagtacttctgcaacacgcacaactacacgatagatagggcggtaatgctggccgatccgttacgccgctgcttcagttcgttacgtcgactttatgggacctcgcccgagtcaagccgttgagatgcaggcaagaagtaggaagcgagggctcaattcaggacagtgagcatggggaaggaaaccggtgtgttttcttccgagctttctgtcctccttcccggtcggggcccctgccactctctcgacgtggctttcgtggcttctcatgggcccccagacacgccactaacgaagttatcgttcgcctttgtggtaggtgttaacggcactatcctgcgggtcattaggtcaagggataagatctcacgcgcaccgttgaacgttggcgctcgatcaagacccgagccgggccggctgagcgacgcggcacctggcccacacacggggaattcaatagtccacggcgctagacccacgggctgcacttggccgaggccgttttcgccccggtacttcaccagcagcaggccgttagtagagccgctcgaggaaacgatcccctcaccactcaccagttcgttcactggcaagcaacgtgacatggagaagggccgccccagtcactcaccttgaaggcaacggcgagcgctggtaagccagcgctgccacacgggcacacgctagcggaatgtagcagcgccggactaaaaagttcgttacagccgagagatggctacattccgacaacttcaacatgctcgtcgagcatcgaaacgtcgaatgactaccctgtaggagattaatgactgccaggtagtcatgtgagcgccaatgactactccgtagacaagactttacttccaggtagatgctaccctacagcttctccagtcgccaagaccccccccccgtcttgaccatgccaggcctgacccccgagcagctcgcggccttcgagcgcgacggcttcctcgtgatccctcgggcgctgtcgcacgctgtctgcgatgagctgcgcgccaaggcgggcgagtacgtggcgcagtgcgacgtgaacgcgcaccgctccatcttcaccacgaacgagcagacgcgccgcatgaacgacgagtacttcctcgagtcgggcgacaagatccgctacttcttcgaggagcacgcgttcgaggccgaccgcaagacgctggccgtgccgctggatgtagccatcaacaagatcggccacaacctgcacaacctcgaccccgtcttccacaaggtcagctacgcgccggaggtcacggacatcctcaagtcgctgggctacgtgcgccccatggccgtgcagtccatgtacatcttcaagcagccgagtatcggcggggaggtcaagccccaccaggacggcagctacctctacacggagccgcagtccgtcgtgggcttctggtgggcgctcgaggactgcacgctcgagaacggctgtctgcacggcgtcccgggctcgcacttgacggtgcccgtgcgtcagaggctcagaaggacgaccaaggagcagcaggagcagaatggtggtttgctgctggagaacgtaccggagacagttgagccctttgatgtgaggaagagccaaccgctgatcacgaacaagggggacttggtgctgttgcacagctccttcgtgcactacagcgaggccaacaagtccccgcactcgcgccacgcctactcgatccacgtcgtggagagccacagtgtggcctaccccgcggacaactggctgcagaccacgggcaacgtgcccttcaagcccatgtacgagagctaacatcttacggtatgaatgtgagtgcaagtttgaggagtggagcagagtggttaatgagaaacacgagctcacttgaggttttatgcttctaaccctttagtaaccattcagcggcgttgttgacgatccgagccacttcatcaacgtgctcctggatcgtagtcgcgttgtccttgaaagccacgcagtcagagatgccggggaaagctgctccagcgtagccctcgtagaatcctgggccgaagatcacgtgtctgtaccatggtcggtgagggaggccagcttcggcgatgaaatggcgctccagctgcacaagtttctcgttccacactcggagaacactttcatcgagctcagcagtcgagtttgtctcaaaggcggcgagtttcgagtgaaaatcggttgcactgccactaaagcggtcgatggcttcgtgaagcgcagcaaagtcgacgccagtgatcttctcttcaagtcgagcgaggtcttccttcataacgacagcgtacgtcgtgtagtcgaaaggaagaactcggttatccgctagacgaagacccagcagcccccaccaacgagcagtcgagacgtgagtggagtagttcggatctccgtacagctcagcgtacatcagactgtccatggagctgtggtacacgccatactgcgcgtggttggagatcgcaaagcccatgtcgaccgaaatgataccgaggtgctgataaaacgccgagtagtccgagcccgagcccaacagcttgatcagatgatccggtcccagagttccgtcgtccgcaccgttgagttgtgcacgcttcacttcagtctgagcgacccattgctcgtatagtgtcgactccgtctcgttcccgtaaaactggttggctggtaaatctttcgcggtgttgaagaggaacgcagcgatggacggactcgatgccgcatacaccaacggtccaatagtcgagtcgacgttcagataggcaacagcctgcttggttagagcttcggtgttgtcctccgcgtactctgtgctgcccagcagaccaggctcctcgccatcccacgagccgagaacgatcgagcgtcgaggcttccaaccttgtttcagcagctcgcccaagcctcgagcaatctctaacagcaccgacgacccgctactcggatcgatcgctccacagacccaggcgtcacggtggttgcccagaatcacctgcttgtccggttcctctgcgccttcgatcgtcccgatgacgtcccagataggactgaccttgttatccatctcaatatcgagattgacgacggtattagcgtcgtcgccaatgcgatagccctcagggaagctcagccctccttgccaagccgctggagctttcattccgcccagtgatgccagaatgtgcttcgcttggccataggaaagcggtagtgctggaatatgaggaatggtcttggcgtcttcgtagtcgagatagggcactaaatgaaataattaaacaaaattctaaaataaaatataaaataaaatattctttaatatttttattaattatttcataactcttttaataaacattgatgtttgatttaatttaataaagtaattaattatttacttaaagaaaatgaaataaaattaatcttaattattaaaagttcactaaaagatactttttttaatcatgaactttctttttaggaatttcaaatatatttttaaaatttaattttgtcgatataatgttttaaaaaatttaaaacaaaatttttttaaagtaaaatatcttttgcacaccaccgcggcgagacgacggcctgcctggacatgcgcacggggtgcgtgggcgacatgcaggcgcagggcattcgcgaggcgctcaagagcaagaagcaggtgctgttctcggctgccgaggccgccgagatgattcaatacaattataattaaaggaataaaatgtgccataaaaataaaacttttaacatttaacatagtccaagcaaaacctgcaattacttttaataaagtatgactttgaaacaacatttttaatactaaaaaatggaattaatatttttaaattacaaacaaacgattttggagttaattatattgatcccacagagtagttaaattttgttttaatattaaagatttataatctaattttttaatagtttttttaacaatataatttcgtaggttttatcttaagaggatttacttcaaatatgttaaataatattccatatattttattatatgttattatttatattataacaagtattaatttatggacttcttatttatctttaaatattaatcataaacctatttaatattaaaccgatttattaaatatcaccattatcaactaatctttgtttctaaattctattattagtaaacatttcttcaatttcatctaatctagtattaaattgatttttcaggaaatttttaataataatttcgaaaatattattcccgaattttttttaacaactagaggtaccatgtaaattttttttaatttttaatttttttaaatgaagatatttattaattttataaacaattaattgaatattatagggattatttttttttaaatcttgtttttttttatgattttgttgaccattgttttaaaagattaccattatgtcttgttaaactaataatagtattttttaaactagctgtaatatgtatatttgctaaaattaaatgatttgtttttttatttttacttttttaaatttatttcgtaaattatatttaaatttattcaagaacatgcttatgttttagctgttgaaaaattattaaattgtgaaattcaattacgtgcacaatattttcgagttcttttttctgaaaatacccgaatttaaatcacttattatctgtttgttgtcatgctttaataaaaataaatttaaatataattttagaaattaatttaaaaaaagtaataaaaaaaatcctgctccagatatggcttttcctcgtatgaataatattagtttttggttattaccgccagctttattattattagtttcatctgcttagtggcggcgtccacggcaccttcgactcggccgttcccgttcactccacgcggtcgagactcaatggctcgagggtgttgagacgagcggctggtgtcgccactctgctcttcttagctgtcgccgggtattcaggcgtagtctccaacaacgaagtcgtagacgtgtccaacatagtgcaggacaatgccgccatcgctgctgtgtcggagctccacggtgttgagaagacgttcgtggacggcgtggatgtcgcccacctacgcgaattccagcacaagttttccaggtgagtgaactgtcgtgagtggctttggaagcaggttgagactttcatattgatacatgaatgagtttagtgtcccccacgttgcaggcagtcggcaagactatgagacggccttgtacacagccgagcagttcgaggcgtttggattgaagaccgagatcaagacgtactacacgttgctctcgacccctgtacgccgtcatctagctatagtaggacctgttgaagctgcacgaaagctcaacttgacggagccatcggtggtcggagacgcgtgcactagtgacgacgacgcattgccgcccttcctcgtgtacgccgccacggggaacgtcacagcctctgtagtctacgtgaacttcggcaagcccgaagacttcgagtggcttgtggccagcaacgtggcactggagggcaaaatcgcactcgctcgctacggcgggaactatcggggcctgaaagtcatggccgcggaagcgcacggcatgacaggagtgctcgtttactcggacccgaacgaagatggcttcgtccagggaccagtgtaccctgacggtccgtggcgaccggaagactcgttccaacgtggagcgaccatcttcttgtcgctagccgctggagacccactcacgcctggtttcgcttctgttcctggcatatacaaaaaaaattcaaaaaaatattaaaaactatcttataataaaattataaatcatttaaattaatattttttaaatcataatattaaattatttattaaaaatgttcaattttttgaaaaactaaaagggctttttattaaataatataattattatattatttaataaaaataagaaaaaatcgatatgtattaaaaattttgattataaagatgaaaaaagtatacaagaaacaggtattgttctttcaatgagtgatggtattgctagatgttaccgtttaactaaaattctttttttatataggacgtaaaagttctgtatttataaccactttaacaactttttttagttgtcttttttcattaattattgattaattttaccattagcacgttgaaaaccttttgttagagatttaattttaaaaattcgagataaattttttttttaataaaaatcttaataaaaatttaatttaaaaatgaagattgattaataaaaatggaaatcattatttatgaaaacgatttatttttgttttaaagctggacttttatttcttttttttctaaacgttgtatataacttgatcttcccgaactttgcccaggccaaacttcttccacgcgttgaatgtggggacgcccacttgttgaatttagcaagttcggtctcggacctccagtagatgtagttctcgtgcgacttgagagccttcccagatagcccgtacagccccaacgctttcttggcctcaacttcgccggccgtgtctttcagattcattcttgacaaaaacttgcgcactttcgacttggccgcggacaggtcgacccatgctcgctcttcgtcgtcgtcttcgtcaacctgtgtgtggacccgaagtgatcttaccccattgagatcccgaccagctttggtcgaatacgaggtggcggacgatcccgtcttggcctcgagtgcttcagtcgccgagagcgcatcagcgagacaggaaagcgcaaatactaccacaagcatcgcttgtagtgcgtacagataacgatggaaaaatacgctccaccaaaaaatacgccatgcgacaagtcccgacttctgatccgatacaaaacaatgtttgtattttagccaatcagacgaacacgagctcgtatgtcttaccaaccattatcaccactggggtccggaccgggaccggtcaacactggtggttttcgatcaaatcattgtagttatctcacgttttggggatgaaataactgtttatttgacgaggggtcttctagatgctggttgggcaaaattacatcaaattttgcggctaggggccaagccgctagacgcgcgccaagccagcacggaaagaagagactcgagtgcagggggcagcttggaacaatgggcagcacggaggcagagactcgaatgcaggtcgccctgaaggagtctgtccagcggacctacgagaaggccactacccttcgacctaagaatacgcagagagcatacagcagtcggcagcaggagttcttagactggtgctcggaaaaagaagcagcatttaataacctgacccggtttacagttactggtgagaagctccatctcttcctacaagagcgcgtaattggccggaccaagcgccacaagagtggaagtacactcagcgacagaaatgaaaccgtcggacgttctactgtgaactcctacgttgctgcgatggttgacctatggaagcagcaatctcgggctaaagtgaacagcaatccctcccccagagacgaagctgtgacgactctattgaagttgacagagtacgaagaagacgagaggaagcggaaaatttttgaggaccgtggagctgatacactactggatggctatacgacaatcggtcaagttaaggagatagctcggtatttctggacaccggcacgcgattcaggcaaaaacttgcggaatttggttgcttttctactgagccactacgcccttatgagaggagagtcggcgcgaatgatggaattggcagacttacactcgattgttctcgaaaacgagggctacacgccatgcagggctctggttatggtgatgcgacagggtaaaaccaaccaagtggggcgcattgaagtcggcgcttgcatgcgcaataagcatgtcgagatctgcccccatggaattcttggattttacttgttttggcgttggcatgtggatggcgaggcatttcccgactttacgtcttcagagcgctggtatccgataaagctcttgaaaacaggtaaacaccccacgaagccaatgtcgtacaaagttcacaatgcagctatcacagcggcgttgaaacatgtcggcgtccacagcaacgcgaaaactcacgttgaccgcggatccggatcgcgtatggcggacttaggaggcgcaagtgagtcccagatccgtcgtttgggtcggtggaatggccaatcaatggagaaatgttacctcacatctcttccgaggcaggcgatgcacacacttgcgggttttgaaccgagtattgggagctttttgttgcccgagcttctgttgatcccccgctagcattacagagtatggtatttccgcaggtggaggtttgtcaacaggccattgcttcaggaacagcggaacaatcgctcgcggccggaggttttctcgagttgctccaatatctccgtaaggtcgtcctccaggatgctgtatttttgcagaaatccgcaccaacacacccaatttggcagcacagcatatttcaatcccaggagttcacggaatttaacagtgaggttatgcaagctgttgacgcaatggaagatccaactgaacagcgtcttcagaaagctgtaccggtgttaaacgccaaaatcgaagggctacaccaggatttcaagagttctttagctcaagtctgctcgaccatgcggacggttcaaggtagcctcagtgacgtaatgcgcgtgttggcacctctgcaaggcggcactgctgttgtacaagttcagcttctatctggagggcgcgaaggcgacggcgataccgctcatgtagtgccgttagcttcaccgatagcaattgacgtgcaaagtggtcggccaaagtataaacttcggcgggggttggctactgtgccggacttgtggaaagaatggtcggtcggcttagatggcgccagagctgtccgagatctcgaggatcagtttggcacaaagtggtgtagtgcggacgaacgacggttcttcaatagaaggcggccaatttacagcttagtcgctgcggttgcagatgatattctcacgtcggctcgggtgtctgacgtcgatgcaactaatctagccgtgcaagtattggaggagtaccggcgtacccataacaaatctctaaactggatagcgaaacatgcgggcgagatcaaagatgctgtccaagctattgcttaaaccaatgtgtgagcagcgcacgcagcattggcgatcgaccaactgctccgcgagaggtactacaatcggcgtgttcggaaggacacgacgttcgaagttggagacttggtgtgggtgctcaagcctccacgaggcaagggcatcacgaagtcggcccatcagtgggtgggcccggcgaggatcgtgctgtcggcaggggtcgacaactgggaggtcgtgcgcgacgacacggacgagcattcgatcgtccactgcagcttcttggtgtcgagccgctgtccgagcgactcgttgggggtgattgcggagaagatcatcacagagctggaactggaggacgacgacgcagagctgcggaggagcgacggcggcgacgaggagcaagtcgcagtgcagcccggtgacggacaggacgagggacagcacgatggcagaagtgctgtcgctacagcgcacgcgggcgctgcagtcgacggaagagtagtgactgaaggccgagaagaaggccaaatgacgtcgcaagcggaggagagcagtgtcgcacggcgaagtacgaaggagacgactggtggcggagaatccacggcggtttttggggtgcggttataatttcggcgcgcactgtatatcacgtagatgcggtacgtgtttctggtacaaaactgagggaagaaaaatccaaccggccatttccacatttcccctcaaagccttgtcctgtagcgccaccgcccaccgggactagcaggcatgcccgcgcccttgccaacgtcgtcatgatactactgccgcattgctgactgtgtactgctgtgctgctgcagatggacatgtccagccagttggatccccaggctttggccgcgttcgtggacgacagtgtctttgctcagatgagcgggaagcttggagcagacgcatcgccgaagaaaaatcttttcgttgcgtggatgctggacgactatcccaacaaagccacactccaactcgaggcctcccagaaccggatacatggattgatacgggtgaagatcagaagagcatacgggcatacacgcgtgtctcgacctcttgcacaaactattgcggccaagacggtgaaagacctcctggcaaagtttgtccctgaagcccgctccggcacgcccaagttggatgaaaatgaaatgaagcgaatcgcggaggcgttcaccaagggccggtacctcggcgaagcccacctcgacctcgcacaatatctgcgggactgctggaaggcctacacccccacaaagtacaaggcgccatgtgtggcggtcgtgcagtcggatggtgcgtgaactcgcgattgaggctcaaaagagcgccttgaacatgaaagtcctgtacatgtgtgctcgtgtgcacgagtcgacggggtttcccaaggctacgagcgagcttcgtggttggctgtttcaagaaggctccaaagtggaagacatcgccagtcgattgaagacaatttacgtctacgcgaacaagcattgggcaaacgttcagaaggaatggctgaagctgtttaccgaaaaggcagcggacacctctgtaaaggcgaaactttcggatgaaacagatacgctggagggggatacctctactgagaagaatccaaatggcagaatcgtggttctggtgatcgatgaagcgagaagtctgctggctgagaagggaggcaagaagaatgacttccgaatgttgcgaaatgctcttagatccgtgaacaaagatatcggccatcgtggatgcattttcggcgtgctgattgatacgaactccaggatctcggacctggcgcctccgctgttgttggacccatcatctcggcttttcgatggagagttggcatcgtttgcgccagttgtgttagctgagacaatggacgcacactgggatcaatactgtgaagaaaaacaagccggcgaagatgaagaaatgaaagaggacatccaagatgtagatgaagaaatgaaagaggaaatactagatgcgggagcagaagatgaagaaatggaagaggaaactcaggttgcggtgggagctgaaaaagacgaagagaagaagaaacagcaagaacgtgctaagatagctatgtacaagagaatcgttaccggggatgcgagtcaagcttggcacgcgttgtgccgcatggggcgtccgatgtggtacagcacttgccccaatcctgcggatagagaagatgtgatcaatcttgcggcgaacaagctgctactggggctccctccttcgcaagatgcgtacaacaaggataccatgcttggtgtcgcctccatgctttgccgtctgggcgtgcgcccgcattcaacgtcggctctggcatctcgggcgactgccgacttcatggcgattctcgcgtatgtgaatttcaagcgagaaggttacgtcaccagctacgcttcggacccagtgctcgccttaggagcgatgaaagtgtggtatgaactgaaacatggtttggcaaagtatatcctgccgcaactcaagaacctccttttggatgaagcattggacaccggtggagttggcgaaattggcgagatggttgctcggattttgctgcttctggcgatggacacgtgtgtgatgggagacaaagacttttcccagtgctaccacacgatcgggcaatttgtaccggtgcaggatttcttggacgtgctgcaaggcaagaaaaagctgccgatatatctcaagcggatgatcagcaaggagaatttgagaccagaattcaacatgtggtgctcgaagtgggatggttggtacatggggttcacccactttgtgcagttgcagcttgagccgaatgaggacacgctttggatttttgctggggcgtcaagctgcaggtattttcccccgtaaccagtatggagccgatttgttgatcccgatgtttaagaagagatccaccagcaagccagtcggtggggagacaacgaggggtgaacaagaggagcaggaagtgttgatgatgttgattcaagtgaagaatcgttccccagtcgatgatgggttttccagggcagcgacggagaaactatgcccctggtttgtgttcggaaagaacagtgatgggaactcgccagcggggaaatctactgatgaaattggtagggatccgaaaccgctgggttccacggatgtccgtgataccattcgcatctacatgaatgtgcgcggtagaacgcgtgacggcaagttcatctatgccacgacaatgaaagacaatcttaagcccaagaagaaaggcaacgcctctgaggtgaaggaggagagtcagacgatcgggagtcaggcgaagaagcgggcgaagatcgagagcaatcctggcgtctcaagtgtgtcgagtgtctcggaggaggatcctgttttcacgatctgcctccgtttgctcaacagggtcacctacccgttcctgagcgaggacgtggcttccattctatcaaacatggtggagtctcagtatgacccgctggggcttgtggagggcgacctggactatcgcgatgaagatgaaaaacgaaacaaggacgttagttcgtatgcaaagttgtcgcttaccgcgacgcgcgacaagttgttgcagaacgcccgtaaagcactagcgtacgcgccgggtgacaaggaagaagagtgacgctgagagtgacgttggtggcagtggtgagggccactaggcgatcaaggtggcgagacggaaacatccaagaaacgagcacgtgaaaaccaagagggtgaagaaggccgtcccactaaacgcgccaagtgatccaacaagacgcccaagcccacaccgaggcagtaacagtacgtgcctggtgcctgcagcaactagttttaactaccaacaatttgttttacttgagagtacgcagccacctccagtacgcttcaccttgcagtcttacggaagtagcacgtcttttgctgtctacgtcgtctttactgctctacctactcgtcctgcaggaacgggtattatagtccatgtacccgtgcgcgtcgccgaggtagaacgtgtccgtgtcgtagtcgttcacgggcttgttgagttggaagcgccgcaccaggtccgggttcgagatgaagtggcggccgatggccacggcgtccgccgcgccctcctccacgatatgcacggccgactgccggtcgaagcccgacgcggcgaggagcacgcccttgtacgtctcgcggaactgccgcgccgagcccttctcgggtgccagcgggtcacgcacgtggtagccacgcggctcgatcaggtgcgcgtaggccaggtcgtagttgttgagcctgttcagcacgtacgtgtaggtggcgacggggtccgattccttgtcgccgaagctgccgccgaacggggacagtcggatgcccaccttggacgagtccagactctcgaggatggcctccagtgcctcgaacaggaagcgcgcgcggttctcgacgctgccgccgtactggtcggcgcggtcgttgatgccgtcgtgcaggaactgctccagcaagtagccgttggcggcgtgcagctcgacgccgtcgaagcccgctttgagggcgttctccgcggccgagcggtagtccgacaactgcagaaacattttgccgtgcacggccttggtcacgtggcgccaagcctcgatctgctggggcgcgaagatgtcaggggagccccaggatccgcggcccgtgggcgtgatgttggtggcctcggcgatgatgaggccgccgggcgtcgcgcgctgcttgtagtactcgacaactgcaggatttctcgacgttttcctactgcgtttttgacgcaatacgaacgatgtgaaagtagagtatcgcggcgatatatacgttatggacaccagggcctcagagttttagtttttcacactattagaacgcctaggcgttgtattcggatagaccgcctagtaggcgttctattttatttcaatgcctgggcgtctggtacggggtaagacagtagcaggcatgcccccattctcgccaccgccgccatgatactactgccactttgctgactgtgtactgctgtgctgctttgcaggtggacatatccagcgagttggactccgacactttggctgcgttcgtcgacgagagcgtattcactcagttgagcgaggagcttcggaagacgaagaatggcgacgatcagccattggcgaagagaaatcttcctatgatgaattatctgaaacaatttgtcgaccccagcaacctccggggctcccaaaaaaacgatagatagcttaaccctatcgttaccagaatgatacatcaagtatctttttactggtgatgcaggagcaagataactgaaacagcaattttctgagccacggcagtttcctcgccgtttatgaccaatcatgcagctaagagggataggtaaaaacccacgctattgtgtcttctgtagtatatctatcaacactattgtgtccccaggggcacggatgcgatcgtcgagcacaacgccagcggcagccgcacacaggtcgccgccggaagtagcggcagcagtgccgccagcgacatcggcagcagggtctcggacacgatggaggtgaccgtggccttggaggacgcggtcaggggcgtctccgccgacatggacacggacacggacgcgatggtggcgggggactcgggcagcaagcataacggcggtcgcagcgccgtgtgtgcgccggcaacatcatgaccacggacgcttgggcgtgaccgttgtcgtgctggaggtggtcgtgggtgcctccaccggcacggaggttggcaaggatgtgaccggtgaccagacagcgtgcgtaaatgcatcgacagtgcggaaggagaccgttgtagaggtgccagcagtaccgtcagcggcatcaacagcatgacgtcctttgtagagatcgtgtccgtacgggaggagatcggaggcaacttcgtcagcatggagtcggacgcaatggtagcgggcgactcgggcagcgagggtagcggccgtggcagcgccgtcagcagcatgacctcagatgtggtggtggcgaacgtggccgtgctggatgtggtctgaggcgtcttcgctgacatatacacagttgggagttattgttcggcttggaggcgcgtggaatttctaatagcatcctgtcggattatacgcagtggagtgtggttagcttgccgctatggtgcaccagtggtaaagcagtatgttgtcagccacgagctaaatccgcatttacggcatcaagactagcgggggcagatggaataggtgtgacttagtgcagtgaagtataaatggttagttgactttgactatcttgaaaaaatgatgtgaggttacgccttggtggctgcgttagcctccttttggtcttggcgggccttcagaaatggacggttagctacataaattggagaggttcgtcgcaagttgccgtcgacagtgtacacttgcttcggcaagtaaaacaaatggtatttctgccagcaagtccaagtttgctgttggcacagatgctgcttcgtagggccaacagggtatgtgcgcttgcacaacgcaactcgatgggtctcgcagtagtcggttttctcggtaggatctctgccctcgaacttgcacacagtgcatttccgcattgagcgactccttccctgaagcacctccgaggacgctcttgcaacacacgtttgtgcgtgatcgcccgaagactcggatacatctgtcgacgccgcggtttgggtcgtcatcggcattgttgtcgttgtcggcttcgcagcatacaccattccatgtcccctatccagagatttcttccagtccccattgaatagttctcgaaccagtgatgccacaaatgcgcgatgactatcgcgggctcttgacctcgattgggctgtacctcccgtcgaacgagactcctcgctctcaccacgcgccaaactatcgcaaatgtaggcattgcacctggctatatcaagcatgaccatcgctagttttttatgccacttctgaaatgagtggccatcggctagagaaaatcgtgcacgcagttggtcgagccgatcaacaccttgcatcgctgaattatactcgccgacgcaagtaggagcagtgaaagccacacccgattcatttatacgacgatgcacagttgatgtggtcgaagcatcggcattagacacgacattgacaattgagccatccacccaactagctgcgacaatatgcttctctaagcatacaccttgcttcatgtagcctcgcggcttcgcgtcctccttacgaatcatcgtaaaatgagggaaatgcttgctagatgtgcgtacagtgccacgcccatagagaccaatcgatcgtaaagtcttcaacagcaaacaggaagtgtagaagttgtccgtgtttacaatgcgactggatcctttcaaagatgaagtaaccgccatgacgtgagagcggatttcagacgacttcgcggttagatcagcgaatttctgcacttctgagcgtgaaattacaccgtccagccgatcatcaagttcactggagcagtgcaacttgaaactcaccgcgtaccacgaggtagaacagcaacacacgtataacttgaaatgatactttccggtgggtttttgtgggctgaagactataatgtggcgggcatactgggatcggcaggcaattgtggcctcatcaacagccacgtttcgaccgacttcaacatggcgcaggcatcgcgatttcagaatgctcatgagtggtcgtattctagctacaggaccgcgcttgatgtcggaggtagacaccttggaacgaaaactcaaatttttacggatgtacaggaatcttcgccatgtcataattgacttcaaactagtagtacgcgctccaggaaaaaatagttgcttcctcgtcgtccacccagtaatttctcatctcacccttgtcgaacagagtcatgtaccagaggatcccaaggaatttcatcagttcctctaaacttacaggagttgccgatgggctgccagacgcgtctgcatactcgttggtaaagacgaccacttggatccagaacgacaacggaataaacgcgaagaacgatgaggttgctgaatgcccaaacaacccatgactttccgggcgtagtctggtagttgaagacccatccggatgtgtatatagccctgacggttggccaagcgatgctgtgggtgaaaatgtcattgacgctatctcttcgacttcaccagggcacaaagggcgctgcaattctttccgcccgcgaaacgcaaaccactcacgataaccacgctcgtccatctcctcaaattcatctgtcagtgcaggaatgtttgatagtttggggaccatgttgcacagggacgtccaagactctccaaattgaagtttgtctttttccatgttggcaaactggcggataccacgggtgatgatggcttcggaaacatggtgaacgtgatcttttatttgaaaagcagtacacgtccattgaacctgaaatttgtcgtgaggaacgctaacattgtcagcatttttttcgcttgccaggctgtagcgagtcaccacactaatcaaaaatgctgcgccaacgtcgcgttacaaactgagcggcatccactcctcatcagccggtgaaaatgctacgctagcatcaacaaatttttcggcagccgcatgtgctcggcgaatcaaatcttctttcattgccacagccttgggtttactggccttggtaggtgccttcttgcttttcgttttccgttgcgcagcttggttttcgcttcggggtgcctttggagctgattgttcggcaggaccgcgcttttttcgcttaggttttgctgcccccgagcaatttgtagcaggatgtgtggcggcgttggtctctgcaggttccgacggagccacacttggcgtcaaaacactcgcggggaggtcaagtagggcattgggtcgttcatcacttctcccttggtccaccaagttcatttttgtagcgtttgtgtagcaaagcgtgctgcaatagctgctatcaccaaaatccttggcgaatccaccattagggtctgggatattcaacgaaacgcagacatcatgagagcagaagtgatggagaaattttttgcaccaggtacaactgcgctcggttgaacactccatattgcagactgcacattgcgcacatgtaccagacgatgcggtgggtgcgtggtgatctagctggagtaaatggtctcgcgtagctgctgcatgtacgggtacgacgcgcgctgatgttggcggtgtagatacagcagatgcagcaccatcataatcctgagaggtgctggcagcaccatcaaacaccgattcgtgacagcttactcccggaagcgcggctttctcacaatcaacgtcgtttgcactcgctccaggaactccgccgctactaccacgtacatcatctgccgcgttgagaccaacatcgccagccccacatatattaacgttgttttggtcgacatcaatttcgtcatcgggtcgcttggacagggcaccatccgtatcaccatcctccactaccaatgtccgccgatagtgctccaaaagcgctcgttcacccagaaaatagtcgataccctctgttccattcgagtcaccaccgggagggatatagcggtacagatcactcaagcttcgccctgttggacgctttgaactccaaccagccgcacttagaactcgccaaacagatccaaacatcgcatggtcatccgcgaggtctgtatgccggtggacacgcgtcaatatgataccttgctcgagcgctaggtaagcaacggatcgtacctagaccggtgggagctgaaggtgagatacgacccgagcgtcgtgattgttgtcgcttagctgtgggctcgcaggtgctcgaccgctgcttccgctttcgtggcattgggtatgtggtggtggacgagctcagctagcgtaccagtggttccttcacggcaaagatctctaactggtttgcatgcatcggtctcgcttgagccattggaccgaatatattgttatttgtatggccatgttcgaagtgttcaaagggaccgaacgtactaggctttgtatggggtggttcgactcatcgttgtatgtgatgttagtatggtggagtttgaacccaccggtgcaggttcaatgcccgccatgcggaatgcagcgtagctgtgctgacaaggtaccgtgcaaaatgcatcggatatcgagtgcgggatgaatacagtgtaattacacagagtcatgaatagtacgagtactcaaagcgttcaacggtaacatacggtacttagatttactccagtattgctaccaaatgtaagtgctgtagcggcttcggcatcgtctccagagttacgttgacccatgcaagccccatagtgacggtccgaactacggtacacggcgacagtggtgacgcccatcgtagatacactgctgccaagtgccaatgccgtctgcgtgtccctgtcgctgggcaaattgggcgcttgcgacgtcgtcgtcatggcgacttcaggctccatcttgacccccgatgggactcgaacgctccatttctagcggtagcctctcttgatctttgtcgccggtggcaccccgctccctcctgaggcatctacgtgcggttgtccgtcgatgagggtcgctggaagcgaaaaagggcgggagaacgccgtccacctgcaggtctagtgggcagtcgtccagtgccgcctccgacgctccatctcggggtcctgtagcggaatcttggcgtctcgcagctgaacgtggttgacagccacacccggcggcaatgccgtgaggagagttgggggctatgggacaaacgacaccatcccagcgccagttctagtagcactgcgttatcgacaacaaatgcgctgttgcggcggttgtgcgggacgtggtcgtcgggtgggtacacgacggacagcgagtccaacttcatgcccggtgcgtcccgaggtcagcgcgtcaagtagcacaggcggtcagcagcagcagatgcgtcgacacacaggagctgagcgtgtgacgactccaacgacgctggacttggagagtgaggggcgaactggcaggctggacttgaccgcagcgtgcacagtatcacgggcagccgcgcgccgtaaacgatgggtacggccagcacatgtgtaccaccgtcgtccgaggcgtggaaaccggaagaacggagcgtggtcagccagggacacttgggatcgagcttgcaaaatcggaaatgagctccgatgcgagaaggtcattttgattcggagcaagccgagcaagccgaccaaacaacagtggatcgatttgaactaattccgccaatcacacttcttgttgaactttggcagccaatcactgtcatcgaattttcggagacaggctttgattggtcaaagcgaagacatgggaaaaaatgtcagcgcgggaaagctcgaaaagatgaaccaaagcaaaatgggcaccaaaaaggcgagcctttacatgttgtgtaaaccacttcaaataccaatagcctatttatgtgacattatgtatcgcgaccgctctacccgttctccctcgccgaaacgccctaccatcggcattcccccaatcatggtctcgatggacctggtcggaagcgtctccgccgtcggcgacacgtggcgggcgactcgggcagcaagcacaacggcggccgcagcaccaccgtgtgtgccgtcaacagcatggtctcggaggcttccgcggtgaccgtggccgtgttggacgtgatcgcgggcgtctccgctggcatggtcacgaacgcgacggtggcatggtcacgaacgcgacgatggcattcggctcgggcagcgagcgcaacgacagcggcagtccgcacgcaggttgccgccggtagtagcgtcagcggcgtcgccagcgacaccgacagcagggtctcggacacgatggaggtgaccgtggccttggtggacgtggtcagcggcgtctccgccgacatggatacggacgcggacgcgatggtggcgggcgactcgggcagcaagcacaacggcggccgcagcaccgccgtgtgtgccgtcaacagcatggtctcggaggcttccgcggcgaccgtggccgtgttggacgtgatcgggggcgtctccgctggcatggtcacgaacgtgacggtggcattcggcgcggtcgatgaggctaataggggtgctttcgtgttggctgggcagtgccacgagagcgtttatagcagcggcatcgatagccgggcttagttgccttgctggcggtaggagcgtcttgaacctggtgttgagtacattgatggggatgggacctttgtgaaaggtcggtaggttatcaggcgaagaagtatgagaccaaatatcttatggtatgtatggcattatagatttctagatctcgtggcaacccgatggcagacttctcggacgaagaggacttgctgctttatcggctggcaaaggagcaggttgatgcaggccgccgaattaactggcggactgtctggttggggatgccatactgcgggaagacacagcgacagctgcagattcgtctaaagacgctgaagaggacacacggcgtgagcttagattctttcccaaggagatttcgggatcaaaaatcggcatggacgcgcttagtggtggccacaaggtgagcgctcccgataatattggcaacgttcatgacgctgtgtcaagtttgtatgcctcggccttgcgtcaacccgtccatgcgccggattgtcatgctggtgagatttcgccaactggggtttcagcaatactggcagtcattccaacgcttacaatcgccgacgcttttgttgactttggatctgggatcggcaacgtggttgcacaagtggcattggagacttgtgttgggagatgcatcgggattgagttccaggacaacttggcaaacatgttcaaactgctgattcgtggcgcacgcgtggatttcccgaatttatccaaggtcacgattcacgaggccgacctcagagcgatgagtccagccgtacgcgaggatattgacgggtgcagtgttttatttgcgaacaatatcgttttcgagcctacaagttttgcggcgctggaggactttgcatcttcagcagcaggtttggtccacgtcgttgtcatggcaacaatttgcggcgggcaccgcccaacctgcccgcgcaacttctgctctgtctggacgctccgcagcgtatcgacgttcacgtgtcttggtcttcccagcttcatcacgcatactggtacaccagggttgtagagccctacatctaagtacctcgcgcagaatggaaagggacattcaatatacttcgtttgtcagacatgttcatcccattgttcattacctgtagagccaataacatatatcagccattgtacacatctacatcaacgtcttgcacggacatcgtagctctgaccgcatcccccaaggtcagagtcacctccatcgcgcctgaaaacctgctgtcgatgtcgctggcgacgccgctgacgctactaccggcggcaacctgcgtgcggactgccgctgtcgttgcgctcgctgcccgagccgaatgccaccgtcgcgttcgtgaccatgccagcggagacgcccccgatcacgtccaacacggccacggtcgccgcggaagcctccgagaccatgctgttgacggtgctgacggcgctcccgtagccatttcgcccgctgcccgagatgcccgcagtcatcgcgtgcttgtcgccgccgtcggagacgctccggccaggtccaggacagccgccatagtcaccagcgtcgcatcggagaccacggcgccgccgcttcacaactaggaaaagccccacataatccacaagatggcgctgtgatccacggtactgctcttactgaagttttattagggtgctgttctcacggtactgcttccactgatacttttgtcgattcgcagcgaatcacagagaagcagtaaaatgatgcctcacgtatctttttgatcgaaaggtcgcttcaaacctcccatcacgtatacttttgatcagttggcctcgcaaacctaatacagcaaaatgatacctcatgcatcattttaccccgttttacttaaagtttgtatggtgtcccttcaaacagaaatgtatggcgttaacgatagggttaatattcatgaagatgatggacgtgtaggagattcctggagtgaccttcgatctggcggaaactatcgcggccaagacggtgaaagacctcctggcaaagtttgtccctgaagcccggatgaaaatgaaatgaagggaatcaccttcccgtcaggaaaatacttaacggatagcgccaaatagcgtaccctttccgaattgaatacctcctctcaaatctgatagaatgtgctcagtatacaaagctattgtacttacgccaatttgtatacctcaaccaaaccgtatagaacgttgagtgcttataattttcttgaaatttatgtgaagtttagcatgtaaacatcttttgattggctaagagatgtcttaaaattgaaaatcaccctttattttccgtgtaagtattactttgtcaaatacggcaagcaagatccggttatttttatctttttaaagaccacagtttaaaaactgacacttgtattcggtaccgtttgcattttgtgtaactttacgcaaaattaccgtaaggtacccaaagaaaaatggttttggttgttggtctaagttctgcttgcatctaacggcatgagagacgttgtgaaccaactctgcgcaatctatggatgtctccatggtttgaagactggtacatacgttggcaggattccatcaaagaggttttgcagaacgtagctagctctacacacaatatttcagacttgaatgcgtcggagctactttggtagtataacccccttcctatttgtatatctttctagatttgacaagtgttcaattcaatagtatgcggtatacaaattggcgttttccgttagctaccgtttttgccatcggtgtagtgtctaggaatcgaagcacacacagcttgaactcgtacgtacttaagtaatcgcaacgagcgctcgtactgctttggccgcgcgtcaccttcactttttaagcgcgttctacctgttcgcgccattcaaaatggcgtaacgcaacgagcgcggctatcaggctccgagattgaatgtcttatttcaagtgtgaattatatggctttcattggataatcgaaagtgtgctctatgatatatatgtgctctatgatattgtgctttgcaaccggttttccctcctaattagtgcactagatagtgatcgtacttagtggtaaatcatagtggatttgaagtcgtgtttcgaagccagcttggctcggaaatggcactttcggaaagtgccaaaaggatgctaatccatgctggatgtgctaaatcatgcaggagatgacatacgcgcgaggaattaagtttcaagtagattgaagcctttttgtaaaagtctaagtaggtgaatgcatcaatttgcaagtagattgccacagtcaaaaataacgttttatcatatccgaattgaacgttaattttatgggcaaaaataactgttttccagggccaagtaatatcgtacgaaattacctttttagagtaagagtgctaatgtgtaagtttacatcatcgcttcgtagaattgtatgcacgcagaccaaactaacgcacttggttctgtattaaaacttcgtcggccgcgcgtctgataagtacagttgggtttgttgaaaagtctgaaagcaacaacctacgactcgtaagttttaaaacggacgggcattctgagcaggccacgcctctgttaagtactcttacgtttattgtaacgtacgacagcaataacttacgactcgtaagttttaaaacggacgggcattccgagcatatcccttcgcggtattctgagcttcttgtcgtacattttgaaacggacgttcatactttttttcagtatcttgggccggagcttagcaacacatctctgtaggagtttcataaccacctcgtttagcccgtgttctcttagctcgcgagttttcactgcagggctcattcgtctttttgtcggatacccacccaactacacgcctcaacacctctaccacctctcctgtttcggtcacccggacaatgtcttcgcccatgatcacctcatccgctgtcgaagaagcggacatcgccgaagtcatcgagatgcgcatgctacgacctgagctagatgtcggcttggatcccctcgacccctcttcttacggcgtagtttccgaccatgggaacaacgttgcgtctgcgacgcttgagtcgaaaaaggctctgctgcaacgctgtcgcgagtttgctcgagcccgtggcttttccattcgcgtggccaacaacagctatcactctcgtcgtcaagaaggaaacgccaagtacacttgcaaggcggtgaaagggcagcagcagctcattccaggcagcactgccaactgcccatttttcattacggtgtacggggtccgcaacaactggaagataacaaggatgtgtctggcccatgaccacttcagacacggcggttttcagggcgatacctttgttgaaggcggtctcgcaggagatacctctcctcagcgacttcgcgatgtgccctaccgagtgatgaggggcgtcgttgagcgtgagttgctcccctcttacagcggaacgtgggcctcgggcacagggcgggctatcatcgactttttgatgactaaggggatgataacgaaccgaactgcggcatccaaaatcaaccgggatcttctcgaattgctgcgcgacgacgtcgtcgggagttaccagaagctggagggatatctagccatggtgagtgatgcgaactccaagacaagctacgggtttggcaggcccgagaataacatgttcagaagggcttgcgtttttccaggggcatgccttcaagtacactgccgacacatcatcggtctggacggaacacatctcaagggtgatatgaacaagcgcggagtgtttctgttggcgaccacgaaggacctagaaggccatgtggagaagcgcgagaacaagatttgttctctgagaaaggcggcataaacgatcgaccaaaaatcaaggggatcaatgatcgagagaagggcgacctgaacaagactgggattgcggagatcgaggagattcgacgagcgatcgaggcaccgggacgatactcgcacgtaggcggggtgtggaaccaggtagatcaaagctgatcgacacatggagagtggtgatgcctcgtcccacaccgatcgaagaggcgcggtgcgaagggcgcatgtcgaaagcgaaggacgtcatgcacgagggcaagatcaacgagcgacatcgtagagtgggacggctgaagaccgaagtggactgatcgcgatcgagagctgtggatcgtcgatcgtcgatcgccgatcagccaagatggggagcacatgggggcgaagccaggacaagaatccagtagttgtttagctgtaggatggtaggtgagatggtagtggtagagagacaccagctaaacataaatcagagcagaatttgcaccgaagagcacaagtcccctcaagtcgtcaagtcccaggaactacattggcctcggcaagcatcgacactttggacagtgagctagtggtacggttaagactggattaatacattggccagcttgacctactctagcgatctatttcttgtgtgcgaaccctcgatcgaccggatactgcttggccggcgatcgtttctcctctcgatcaacctcgatcccgctataggaagcggcaagcaactcacgaaaggaaggaacacacccggaaaggcaactacaggccgtggatcgactccaggccgaccgatcggagcgaacaaccctcgatcgaagcgtatactcggacgcagagcgaagattcccgcgctgctccacaacctatccccgcgtcacgccaatacattcgatcttcaccagattttggccgatcccgctacaccacagccacatcctagttttcggactcgctattgtcgatcaagaggattacgcattggagctggttcctgcagaacatgaaagacgcgcttcaagacgtctcggcgtggaaacctgtgttcgtatcggacagacagaaggatctcctggcgtctgtgacggagttgtatccggattccggacatcgattttgcgttgggcacattatcaccaacatcgagaagaagggctccgcgctgacgccggcagaacagtcacttgtgtttcagatggcacgtagcgaatgcgagaacgactacaagtgttacagctcaaaactctcggagactcgccctttggctgtggagtatctcgctggaattgacaagtcgcactgggtgacatacgcgttcaacgagaagtacaaccaaccctcttatgacgaggtcacttccaacctgtccgaggcagcgaacagttggttgggcaatgcagtgcggtcgtcctaccccttggaagctttcgagcaatacttcgtcaaggtggttgagctgttcgccgaaaggcgccgcacctcctcgcgacagaagggtccaggtagcaacgcaggacacgcaagcacctcccaaggtgagccgtacgacgattgcgaaattgacgtgatgaggaccacccctgcagccttctcggactttctccttcccacctacaagaagaagctcgacgggatcatggctcttacgaaaaccctgcagattttgccgtgccttgatggccagtacatggtgcgattcacggacatcagcagcagaccggaccacgcccatctgtggcgaaccgtgaacttgatcgagaaggaatgcaacgtgccgacgctggcaagacctgatgttcccgtctgtccatgcagtcaaagctgcaattcaccacggaatgcacgtgagcgagcttttcgcctggaaggaacacaccgtgtcggtcgcgcggcggacatattactaccagtttgtcccgaccgtccgctcggcgaccatcgctcaggatcttcaactgctagtacctgaagtcatcgtcactgaagctgacttagggaagcgtggcatgaagccgggtccaaagccgaagaacaaacgcaggtctgcacgaccaggttctgcggcgtcgcctgccattgctatgactcaataatactagagctgcaagacgtatgcagtacagtcgtaagtccttgcaaaagcataacaaagcaaaaattacatttcgaattcttagtgtcaatacgtcgagaacggaccttggttttcttaaaattcttctcgtacgaaaatgatatcataaaattcttatttacctttaatagaacttggatcgaaggaaagtatcatacacgtgatagttcaaggatagataatatactgcaaggataaacttaagtgaaagatattatatctgtaatatcgtacgaatgtgttactttgatgcttactgtgacttgacgaaaattggtattccatagcaacaattcgcacgatcgtacgactttacttcccagtaatacaactcgttcttgtgcgctattattgatactaatgcaatgtaaatgaaataagtatatacaacaaatttattatcatttgctgcttagaccatttcatcaaaataaagtaaaaaaaatatttttaattactcaaaaatgaagaaaataaagctgtatggctagccggatggctacatccgaatgggaactctacacgtagggcagttagctacatcttcggcctgaatgcttctcgccacgtacattgacatgcactcggcacacatggcatgtcagcatgagcgcggggtgaccggcgccactggcgcgtactagcaaatggcgcaagttgatagatcctcgtcttggtcctcctcccccgtaatgtcgatcaccgttgggggagctggtgccgagaaaacacgacgtcgtcgagcagagcggggaggtgagctctgagctgttgttgaaccccctaactcaatgtccccaggcacagacaggacgagcgactcaacaatagtcgtggtcacgtcacctgcggccgtagtgatgatacgcaggtcaagctcgttaagcgcgtcacggcgagcgcggtggtacagcttatcgtactcgcgcttgtaggctcgagtcgctgagcctttaggatcgggtaccgcttttccaggcacgcacgcttgccaacgagctgccgcagacttgagacaacccagttggtgttgcacagggggcagttggcaccatgatgttttcaataatgaggcacctacttattttgttatcgctgatgttccgtttgctcgtcctccatcatcttcatatcttaccctgtccttaattcttatcgcgttttcaagttctgataaaacgttatttttgactgtggcaatctacttgcaagttgatgcattcacctacttagacttttacaaaaatgcttcaatctacttgaattacttaattcctccatatgcgcactacttattagggcatctccaccggtgctgagtaaaactaaaagcaaattgccctaagatccgtgcctacaacggcacaaccgtgctaaagacagtgcgcagctccaccggcaattgagactcgcagcaagcgcgttatagctcttggttcggcgccagccatggcgacggcgcacagctgtatagccctataaagggcccggcagcacgttgaggaagacccagggatgacgtagcaagggcgacactgcggtctgtgacgcttgcgctgcttagaacgcttgacttggccctactactggtcggtcgacatttacatgtactcaaccttttactcaaagcctcctccgttggcaaacttgtgcaaaactttgatctgcgtaaaaaatggagcaatttgctcagcatttactcaaaccggtggagctgtacaaaactaaaactatgattaaatattgacagaaaaggggtaaaatttagttttactcacgaccggtggagatgctcctagtgctgattcatactctttcgtaagacgatacttagccccagaatgcctatcataagacaaagcgtcttacgttttccgatcaacgcgttttgactacatcttggttgttgtataccagtggctacattgcatattgtctgtcaaaacataagacagtttgtcggacactagtttgcgccatacaattggccaaaaatgttcaggtctgctcgccacgacagcggcatcgttgccgcggacgcggtggcaacgttgagcgccgaaacgatgcagttgcatggtgcggtagggtaagtagcctcctgttcacacacgaagcgatatgcctgtagttggccgctggcagcaagcttaaatatcggcataatgactgcacgaacgcgtgcatgcagtccgtggagctgttccactcagaggtgcagccgttgtagggcacggagttacgatgaagtttgtagacgtagactaagagggacaaatagctcgtaacggtactacatgtacattttaatgtagtaatttttatgcttgagcgtacatcatagtagttgtgaaggcgaggcagccagggaacggtgttgccagtgggcttcccgagatcctccgaccccctcttacctaatcattacagtccagcaacaaaatgcaaccacgtactctgcaacggcgataacacctagatattgtacctacgacgctgaggtgcggaggagctccacactgctgcgcgggcgctcggcgcgcgccatatcgctgctgggctcgaccttcggcatcggcgagttactcggtatctcctgcaactaagccactgcctgcagccatgctttttgccgatgctacagcgtagactggtttgcgtgtgcgccctctatccgaatctccatcttctatgtagtgttagtactttactgtagaaaggagagttggcgtggtggggtgaacgactgttgtcgttcaccccagtaaagcgaagaaacattgctccactacgggaacaaacggtcgcatgataactgtgctatgatgtccttacattccattcctggcaagtatatttaaatcttctagcaggaggttagtgcatggcgtcaggatcaaaagcccggacatttttcaagtgcgctgcctctagtaaagggggcaaaatgcgcacacagatgaatcagtccaatttacgagccgagatgcagcaacactcaaaactacataatacaatattaaccaatgaaattgctacatttgatttgtcgtcaaactgtgttacgaatgctcgacacaagtgaccgaccatccacgacttacagcaattcgtactcgagtacgatttatagtcgtactcgataagtcgtacgagttattgtgctttgcagttattttgccgaccattttagacgctaaatatggcaaagcctgctcctaannnnnnnnnnnnnnnnnnnnnnnnnnnnnnnnnnnnnnnnnnnnnnnnnnnnnnnnnnnnnnnnnnnnnnnnnnnnnnnnnnnnnnnnnnnnnnnnnnnnnnnnnnnnnnnnnnnnnnnnnnnnnnnnnnnnnnnnnnnnnnnnnnnnnnnnnnnnnnnnnnnnnnnnnnnnnnnnnnnnnnnnnnnnnnnnnnnnnnnnnnnnnnnnnnnnnnnnnnnnnnnnnnnnnnnnnnnnnnnnnnnnnnnnnnnnnnnnnnnnnnnnnnnnnnnnnnnnnnnnnnnnnnnnnnnnnnnnnnnnnnnnnnnnnnnnnnnnnnnnnnnnnnnnnnnnnnnnnnnnnnnnnnnnnnnnnnnnnnnnnnnnnnnnnnnnnnnnnnnnnnnnnnnnnnnnnnnnnnnnnnnnnnnnnnnnnnnnnnnnnnnnnnnnnnnnnnnnnnnnnnnnnnnnnnnnnnnnnnnnnnnnnnnnnnnnnnnnnnnnnnnnnnnnnnnnnnnnnnnnnnnnnnnnnnnnnnnnnnnnnnnnnnnnnnnnnnnnnnnnnnnnnnnnnnnnnnnnnnnnnnnnnnnnnnnnnnnnnnnnnnnnnnnnnnnnnnnnnnnnnnnnnnnnnnnnnnnnnnnnnnnnnnnnnnnnnnnnnnnnnnnnnnnnnnnnnnnnnnnnnnnnnnnnnnnnnnnnnnnnnnnnnnnnnnnnnnnnnnnnnnnnnnnnnnnnnnnnnnnnnnnnnnnnnnnnnnnnnnnnnnnnnnnnnnnnnnnnnnnnnnnnnnnnnnnnnnnnnnnnnnnnnnnnnnnnnnnnnnnnnnnnnnnnnnnnnnnnnnnnnnnnnnnnnnnnnnnnnnnnnnnnnnnnnnnnnnnnnnnnnnnnnnnnnnnnnnnnnnnnnnnnnnnnnnnnnnnnnnnnnnnnnnnnnnnnnnnnnnnnnnnnnnnnnnnnnnnnnnnnnnnnnnnnnnnnnnnnnnnnnnnnnnnnnnnnnnnnnnnnnnnnnnnnnnnnnnnnnnnnnnnnnnnnnnnnnnnnnnnnnnnnnnnnnnnnnnnnnnnnnnnnnnnnnnnnnnnnnnnnnnnnnnnnnnnnnnnnnnnnnnnnnnnnnnnnnnnnnnnnnnnnnnnnnnnnnnnnnnnnnnnnnnnnnnnnnnnnnnnnnnnnnnnnnnnnnnnnnnnnnnnnnnnnnnnnnnnnnnnnnnnnnnnnnnnnnnnnnnnnnnnnnnnnnnnnnnnnnnnnnnnnnnnnnnnnnnnnnnnnnnnnnnnnnnnnnnnnnnnnnnnnnnnnnnnnnnnnnnnnnnnnnnnnnnnnnnnnnnnnnnnnnnnnnnnnnnnnnnnnnnnnnnnnnnnnnnnnnnnnnnnnnnnnnnnnnnnnnnnnnnnnnnnnnnnnnnnnnnnnnnnnnnnnnnnnnnnnnnnnnnnnnnnnnnnnnnnnnnnnnnnnnnnnnnnnnnnnnnnnnnnnnnnnnnnnnnnnnnnnnnnnnnnnnnnnnnnnnnnnnnnnnnnnnnnnnnnnnnnnnnnnnnnnnnnnnnnnnnnnnnnnnnnnnnnnnnnnnnnnnnnnnnnnnnnnnnnnnnnnnnnnnnnnnnnnnnnnnnnnnnnnnnnnnnnnnnnnnnnnnnnnnnnnnnnnnnnnnnnnnnnnnnnnnnnnnnnnnnnnnnnnnnnnnnnnnnnnnnnnnnnnnnnnnnnnnnnnnnnnnnnnnnnnnnnnnnnnnnnnnnnnnnnnnnnnnnnnnnnnnnnnnnnnnnnnnnnnnnnnnnnnnnnnnnnnnnnnnnnnnnnnnnnnnnnnnnnnnnnnnnnnnnnnnnnnnnnnnnnnnnnnnnnnnnnnnnnnnnnnnnnnnnnnnnnnnnnnnnnnnnnnnnnnnnnnnnnnnnnnnnnnnnnnnnnnnnnnnnnnnnnnnnnnnnnnnnnnnnnnnnnnnnnnnnnnnnnnnnnnnnnnnnnnnnnnnnnnnnnnnnnnnnnnnnnnnnnnnnnnnnnnnnnnnnnnnnnnnnnnnnnnnnnnnnnnnnnnnnnnnnnnnnnnnnnnnnnnnnnnnnnnnnnnnnnnnnnnnnnnnnnnnnnnnnnnnnnnnnnnnnnnnnnnnnnnnnnnnnnnnnnnnnnnnnnnnnnnnnnnnnnnnnnnnnnnnnnnnnnnnnnnnnnnnnnnnnnnnnnnnnnnnnnnnnnnnnnnnnnnnnnnnnnnnnnnnnnnnnnnnnnnnnnnnnnnnnnnnnnnnnnnnnnnnnnnnnnnnnnnnnnnnnnnnnnnnnnnnnnnnnnnnnnnnnnnnnnnnnnnnnnnnnnnnnnnnnnnnnnnnnnnnnnnnnnnnnnnnnnnnnnnnnnnnnnnnnnnnnnnnnnnnnnnnnnnnnnnnnnnnnnnnnnnnnnnnnnnnnnnnnnnnnnnnnnnnnnnnnnnnnnnnnnnnnnnnnnnnnnnnnnnnnnnnnnnnnnnnnnnnnnnnnnnnnnnnnnnnnnnnnnnnnnnnnnnnnnnnnnnnnnnnnnnnnnnnnnnnnnnnnnnnnnnnnnnnnnnnnnnnnnnnnnnnnnnnnnnnnnnnnnnnnnnnnnnnnnnnnnnnnnnnnnnnnnnnnnnnnnnnnnnnnnnnnnnnnnnnnnnnnnnnnnnnnnnnnnnnnnnnnnnnnnnnnnnnnnnnnnnnnnnnnnnnnnnnnnnnnnnnnnnnnnnnnnnnnnnnnnnnnnnnnnnnnnnnnnnnnnnnnnnnnnnnnnnnnnnnnnnnnnnnnnnnnnnnnnnnnnnnnnnnnnnnnnnnnnnnnnnnnnnnnnnnnnnnnnnnnnnnnnnnnnnnnnnnnnnnnnnnnnnnnnnnnnnnnnnnnnnnnnnnnnnnnnnnnnnnnnnnnnnnnnnnnnnnnnnnnnnnnnnnnnnnnnnnnnnnnnnnnnnnnnnnnnnnnnnnnnnnnnnnnnnnnnnnnnnnnnnnnnnnnnnnnnnnnnnnnnnnnnnnnnnnnnnnnnnnnnnnnnnnnnnnnnnnnnnnnnnnnnnnnnnnnnnnnnnnnnnnnnnnnnnnnnnnnnnnnnnnnnnnnnnnnnnnnnnnnnnnnnnnnnnnnnnnnnnnnnnnnnnnnnnnnnnnnnnnnnnnnnnnnnnnnnnnnnnnnnnnnnnnnnnnnnnnnnnnnnnnnnnnnnnnnnnnnnnnnnnnnnnnnnnnnnnnnnnnnnnnnnnnnnnnnnnnnnnnnnnnnnnnnnnnnnnnnnnnnnnnnnnnnnnnnnnnnnnnnnnnnnnnnnnnnnnnnnnnnnnnnnnnnnnnnnnnnnnnnnnnnnnnnnnnnnnnnnnnnnnnnnnnnnnnnnnnnnnnnnnnnnnnnnnnnnnnnnnnnnnnnnnnnnnnnnnnnnnnnnnnnnnnnnnnnnnnnnnnnnnnnnnnnnnnnnnnnnnnnnnnnnnnnnnnnnnnnnnnnnnnnnnnnnnnnnnnnnnnnnnnnnnnnnnnnnnnnnnnnnnnnnnnnnnnnnnnnnnnnnnnnnnnnnnnnnnnnnnnnnnnnnnnnnnnnnnnnnnnnnnnnnnnnnnnnnnnnnnnnnnnnnnnnnnnnnnnnnnnnnnnnnnnnnnnnnnnnnnnnnnnnnnnnnnnnnnnnnnnnnnnnnnnnnnnnnnnnnnnnnnnnnnnnnnnnnnnnnnnnnnnnnnnnnnnnnnnnnnnnnnnnnnnnnnnnnnnnnnnnnnnnnnnnnnnnnnnnnnnnnnnnnnnnnnnnnnnnnnnnnnnnnnnnnnnnnnnnnnnnnnnnnnnnnnnnnnnnnnnnnnnnnnnnnnnnnnnnnnnnnnnnnnnnnnnnnnnnnnnnnnnnnnnnnnnnnnnnnnnnnnnnnnnnnnnnnnnnnnnnnnnnnnnnnnnnnnnnnnnnnnnnnnnnnnnnnnnnnnnnnnnnnnnnnnnnnnnnnnnnnnnnnnnnnnnnnnnnnnnnnnnnnnnnnnnnnnnnnnnnnnnnnnnnnnnnnnnnnnnnnnnnnnnnnnnnnnnnnnnnnnnnnnnnnnnnnnnnnnnnnnnnnnnnnnnnnnnnnnnnnnnnnnnnnnnnnnnnnnnnnnnnnnnnnnnnnnnnnnnnnnnnnnnnnnnnnnnnnnnnnnnnnnnnnnnnnnnnnnnnnnnnnnnnnnnnnnnnnnnnnnnnnnnnnnnnnnnnnnnnnnnnnnnnnnnnnnnnnnnnnnnnnnnnnnnnnnnnnnnnnnnnnnnnnnnnnnnnnnnnnnnnnnnnnnnnnnnnnnnnnnnnnnnnnnnnnnnnnnnnnnnnnnnnnnnnnnnnnnnnnnnnnnnnnnnnnnnnnnnnnnnnnnnnnnnnnnnnnnnnnnnnnnnnnnnnnnnnnnnnnnnnnnnnnnnnnnnnnnnnnnnnnnnnnnnnnnnnnnnnnnnnnnnnnnnnnnnnnnnnnnnnnnnnnnnnnnnnnnnnnnnnnnnnnnnnnnnnnnnnnnnnnnnnnnnnnnnnnnnnnnnnnnnnnnnnnnnnnnnnnnnnnnnnnnnnnnnnnnnnnnnnnnnnnnnnnnnnnnnnnnnnnnnnnnnnnnnnnnnnnnnnnnnnnnnnnnnnnnnnnnnnnnnnnnnnnnnnnnnnnnnnnnnnnnnnnnnnnnnnnnnnnnnnnnnnnnnnnnnnnnnnnnnnnnnnnnnnnnnnnnnnnnnnnnnnnnnnnnnnnnnnnnnnnnnnnnnnnnnnnnnnnnnnnnnnnnnnnnnnnnnnnnnnnnnnnnnnnnnnnnnnnnnnnnnnnnnnnnnnnnnnnnnnnnnnnnnnnnnnnnnnnnnnnnnnnnnnnnnnnnnnnnnnnnnnnnnnnnnnnnnnnnnnnnnnnnnnnnnnnnnnnnnnnnnnnnnnnnnnnnnnnnnnnnnnnnnnnnnnnnnnnnnnnnnnnnnnnnnnnnnnnnnnnnnnnnnnnnnnnnnnnnnnnnnnnnnnnnnnnnnnnnnnnnnnnnnnnnnnnnnnnnnnnnnnnnnnnnnnnnnnnnnnnnnnnnnnnnnnnnnnnnnnnnnnnnnnnnnnnnnnnnnnnnnnnnnnnnnnnnnnnnnnnnnnnnnnnnnnnnnnnnnnnnnnnnnnnnnnnnnnnnnnnnnnnnnnnnnnnnnnnnnnnnnnnnnnnnnnnnnnnnnnnnnnnnnnnnnnnnnnnnnnnnnnnnnnnnnnnnnnnnnnnnnnnnnnnnnnnnnnnnnnnnnnnnnnnnnnnnnnnnnnnnnnnnnnnnnnnnnnnnnnnnnnnnnnnnnnnnnnnnnnnnnnnnnnnnnnnnnnnnnnnnnnnnnnnnnnnnnnnnnnnnnnnnnnnnnnaaagccacactccaactcgaggcctcccagaaccagatacatggattgatacgggtggagatcagaaaagcatacgggcatacacgcgtgtctcaacctcttgcacaaactattgcggccaagacggtgaaagacctcctggcaaagtttgtccctgaagcccgctccggcacgcccaagttggatgaaaatgaaatgaagcgaatcgcggaggcgttcaccaagggccggtacctcggcgaagcccacctcgacctcgcacagtatctgcgggactgctggaaggcctacacccccacaaagtacaaggcgccatgtgtggcggtcgtgcagagttctggcttcggcaagagtcggatggtgcgtgaactcgcgattgaggctcaaaagagcgccttgaacatgaaagtgctgtacatgtgtgcccgtgtgcacgagtcgacggggtttcccaaggctacgagcgagcttcgtggttggctgtttcaagaaggctccgaagtggaagacatcgccagtcgattgaagacaatttacgtctacgcgaacaagcattgggcggacgttcagaaggaatggctgaagctgtttaccgaacaggcagcggacacctctgtaaaggcgaaactttcggatgaaacagacacgctggagggggatacctccaccgagaagaatccaaatggcagaatcgtggttctggtgatcgatgaagcgagaagtctgctggctgagaagggaggcaagaagaatgacttccgaatgttgcgaaatgctctcagatccgtgaacaaagatatcggccatcgtggatgcattttcggcgtgctgattgatacgaactccaggatctcggacctggcgcctccgctgttgttggacccatcatctcggcttttcgatggagagttggcatcgtttgcgccagttgtgttagctgagacaatggacgcacactgggatcaatactgtgaagaaaaacaagccggcgaagatgaagaaatgaaagaggacatccaagatgtagatgaagaaatgaaagaggaaatactagatgcgggagcagaagatgaagaaatggaagaggaaactcaggttgcggtgggagctgaaaaagacgaagagaagaagaaacagcaagaacgtgctaagatagctatgtacaagagaatcgttaccggggatgcgagtcaagcttggcacgcgttgtgccgcatggggcgtccgatgtggtacagcacttgccccaatcctgcggatagagaagatgtgatcaatcttgcggcgaacaagctgctactggggctccctccttcgcaagatgcgtacaacaaggataccatgtttggtgtcgcctccatgctttgccgactgggcgtgcgcccgcattcaacgtcggctttggcatctcgggcgactgccgacttcatggcgattctcgcgtatgtgaatttcaatcgagaaggttacgtcaccagctacgcttcggacccagtgctcgccttaggagcgatgaaagtgtggtatgaactgaaacatggtttggcaaagtatatcctgccgcaactcaagaacctccttttggatgaagcattggacaccggtggagttggcgaaattggcgagatggttgctcggattttgctgcttctggcgatggacacgtgtgtgatgggggacaaagacttttcccagtgctaccacacgatcgggcaatttgtaccggtgcaggatttcttggacgtgctgcaaggcaacaaggagagaccgatatattgtaaggggatgtacaacgcggaagataagagaccagaaatcaacgagtggcgctcgcagtgggagggttggtacgtggggttcacccactatgtgcagttgcggctcgagccgaatgaggacacgctttggtttttgctggggcgtcaagctgcaggtattttcccccgtaaccagtatggagccgatttgttgatcccgatgtttaagaagagatccaacagcaggccagtcggtggggagacaacgaggggtgaacaagaggagcaggaagtgttgatgatgttgattcaagtgaagaatcgttccccagtcgatggtgggttttccagggcagcgacggagaaactatgcccctggtttgtgttcggaaagaacagtgatgggaactcgtcannnnnnnnnnnnnnnnnnnnnnnnnnnnnnnnnnnnnnnnnnnnnnnnnnnnnnnnnnnnnnnnnnnnnnnnnnnnnnnnnnnnnnnnnnnnnnnnnnnnacacctcatgcccctcctgctacccctcgttgtctccccaccgactggcctgctgttggatctcttcttaaacatcgggatcaacaaatcggctccatactggttacgggggaaaatacctgcagcttgacgccccagcaaaaaccaaagcgtgtcctcattcggctcaagctgcaactgcacaaagtgggtgaaccccatgtaccaaccatcccacttcgagcaccacttgttgaattctggtctcaaattctccttgctgatcatccgcttgagatatatcggcagctttttcttgccttgtagcaccttcaagaattgctgcaccggtacaaattgcccgatcgtgtggcaccactgggaaaagtctttgtcccccatcacacacgtgtccatcgccagaagcagcaaaatccgagcaaccatctcgccaatttcgccaactccaccggtgtccaatgattcatccaaaaggaggttcttgagttgcggcaggatatactttgccagaccatatttcagttcataccacactttcatcgctcctaaggcgagcactgggtccgaagcgtagctggtgacgtaaccctctcgtttgaagttcacatacgcgagaatcgccatgaagtcagcgggggcccgagatgccaaagccgacgtcgaatgcggtcgaacacccagtcgacaaagcatggaggcgacaccaaacatggtatccttgttgtacgcattttgcgaagggggaatccccagtagcagtttattcgccgcgagatcaatcacgcgaacttaatgagctggatcggggtaagtgctgtaccacatcgggcggcccatgcgcctcaacgcctcccaggcctgaccgtcacttccagttacgacggtcttgtacatggctatcgtagcacgttcttgctgtttcgttttctcttcgtcttcagctcccacctcaacttgggttccctcgtttatctcttcatcttcaaagtagtcatcccagtgtgcgtccatcgtatcagctagtacaagcggcgcgaacgatgccaaactacctccagatttccgagaagatgggtccaacaacagaggcggcgtcaggtccgagatctgcgagttcgtatcaatcagcacgccgaaaatgcctccttcgggcccgatatcttcgttagcggatttaagagcatttcgcaacatacgaaaatcgttcttcttgccatccacctcagccagcagacttctcgcttcatcgatcaccagaaccaccattttgccatctggatccttcacggtggaggtacccgtagtttggataaaggtgtcctgtacggatgctgaatcggacgcctttatcatttctgtttctttcaaaagcttggccgcacacggaactgtcagttgcattgtcgataaagagctccagccattccgtctgaacgtccgcccaatgatctttcgcatagcagtaaatcgccttcaatcgcctggcgacctcttgcactgaggaggcggcagggtcaaacagccaatcacgaagcttactcgtagcctccggaaaccccgtcgatcggtgcacacgcgcgcacatgtacaaaactttcaggttcaagttcggttctcgttctgccttgagcgcaagctcacgcactgtccgactcttgccgaagccggaactctgcacaaccgccacacatggcgccttgtacttgtgcagggttgtactctttccagcagtcccgcaggtattctgcgaggtcgtcttgggccttgccgacgtacgtgactttaacgcatccgagagtcgaatcatttcgtcttcacccagcttggtgatgagggggttgtcttccggaacaaactttgccaggaggtcttcaatcgtcttgaccgtaatggtttccgcaagatcgaccgtcacgtctgggtgctcgtatacgattctaatcttcacctccaagcatcccttaaattctttctgagagacccggagtcccgcgtcgcgatattttttcaaatactcatcgatgcgaagaggcttcttctccagtgctccctcgttgccttccttcgcgtcccccagtttcgcgctcaactgagtgaagacgctgtcgtccacgaatgcggctatctcctcgactccaggctggagatccgactggctcgccatgtccagcagagcggcagtgttgacttctctttaatgtagaccacatattcgctttaattggacataatcactatgtagtttctgtttttattggacaaaagtatttaggcgcacatctcgccaggtttattataataacacatattgtactttttggcacttcagactgtatttgtgctttgcaatgattttggcaatatgaggcgagatttgctgtattattacgaccacctgctagatttacgataaatcgaggtgcgtaaatgggtggaggcctagaattacgctcaaagcgccataattgcactttcaaaagtgcaattgtggctgtgcagctgcaattctgtcggtttttatccacaagcacctacacacacggcaattatgcataagagggtggatgtgctggggatcatggacggtggtgtactgggccaatgcatggctgctgacaggccctcccaagtcgatatatatatgaggaggtggatttatgcataattttagcaggccgtgtatcttctttcacacatatttaggagcaggctttgccatatttagcgtctaaaatggtcggcaaaataactgcaaagcacaataactcgtacgacttatcgagcacgactataaatcgtactcgagtacgaattgctgtaagtcgtggatggtcaatcacttgtgtcgagcattcgtaagacagtttgacgacaaatcaaatgtagcaatttcattggttaatattgtattttgtagttttgagtgttgctgcatctcggctcgtaaattggactgattcatctgtgtgcgcattttgccccctttactagaggcagcgcacttgaaaaatgtccgggcttttgatcctgacgccatgcactaacctcctgctagaagatttaaatatacttgccaggaatggaatgtaaggacatcatagcacagttatcatacgaccgtttgttcccgtagtggagcaatgtttcttcgctttactggggtgaacgactgttgtcgttcaccactgttgtcgtgaacgactgttgtcgttcaccccaccacgccaactctcctttctacagtaaagtactaacactacatagaagatggagattcggatagagggcgcatacgcaaaccagtctacgctgtagcatcgacaaaaagcgtggctgcaggcagtggcttagttgcaggagataccgagtaactcgccgatgccgaaggtcgagcccagcagcgatatggcgcgcgccgagcgcccgcgcagcagtgtggagctcctccgcacctcagcgtcgtaggtacaatatctaggtgttatcgccgttgcagagtacgtggttgcattttgttgctggactgtaatgattaggtaagagggggtcggaggatctcgggaagcccactggcaacaccgttccctggctgcctcgccttcagaactactatgatgtacgctcaagcataaaaattactacattaaaatgtacatgtagtaccgttacgagctatttgtccctcttagtctacgtctacaaacttcatcgtaactccgtgcccttcaacggctgcacctctgagtggaacagctccacggactgcatgcacgcgttcgtgcagtcattatgccgatatttaagcttgctgccagcggccaactacaggcacatcgcttcgtgtgtgaacaggaggctacttaccctaccgcatcatgcaactgcatcgtttcggcgctcaacgttgccgctgtcgtggcgagcagacctgaacatttttggccaattgtatggcgcaaactagtgtccgacaaactgtcttatgttttgacagacaatatgcaatgtagccactggtatacaacaaccaagatgtagtcaaaacgcgttgatcggaaaacgtaagacgctttgtcttatgataggcattctggggctaagtatcgtcttacgaaagagtatgaatcagcactaggagcatctccaccggtcgtgagtaaaactaaattttaccccttttctgtcaatatttaatcatagttttagttttgtacagctccaccggtttgagcaaatgctgagcaaattgctccattttttacgcagatcaacgttttgcacaactttgccaacggaggaggctttgagtaaaaggttgagtacatgtaaatgtcgaccgaccagtagtagggccaagtcaagcgttctaagcagcgcaagcgtcacagaccgcagtgtcgcccttgctacgtcatccctgggtcttcctcaacgtgctgccgggccctttatagggctatacagctgtgcgccgtcgccatggctggcaccgaaccaagagctttaacgcgcttgctgcgagtctcaattgccggtggagctgcgcactgtctttagcacggttatgccgttgtaggcacggatcttagggcaatttgcttttagttttactcagcaccggtggagatgccctaataagtagtgcgcatatggaggaattaagtaattcaagtagattgaagaatttttgtaaaagtctaagtaggtgaatgcatcaacttgcaagtagattgccacagtcaaaaataacgttttatcagaacttgaaaacgcgataagaattaaggacagggtaagatatgaagatgatggaggacgagcaaacggaacatcagcgatagcaaaataagtaggtgcctcattattgaaaacatcatggtgccaactgccccctgtgcaacaccaactgggctgtctcaagtctgcggcagctcgttggcaagcgtgcgtgcctggaaaagcggtacccgatcctaaaggctcagcgactggaaaaggcccgagcctacaagcgcgagtacgataagctgtaccaccgcgctcgccgtgacgcgcttaacgagcttgacctgcgtatcatcactacggccgcaggtgacgtgaccacgactgttgttgagtcgctcgtcctgtctgtgcctggggacattgagttagggggttcaacaacagctcagagctcacctccccgctctgctcgacgacgtcgtgttttctcggcaccagctttcccaacggtgatcgacattacgggggaggaggaccaagacgaggacctatcaacttgcgccatttgctagtacgcgccagtggcgccggtcaccccgcgctcatgctgacatgccatgtgtgccgagtgcatgtcagtgtacgtggcgagaagcattcaggccgaagatgtagctaactgccctacgtgtagagttcccattcggatgtagccatccggctagccatacagctttattttcttcatttttgagtaattaaaaatattttttcacgttattttgatgaaatggtctaagcagcaaatgataataaatttgttgtatatacttctttcatttacattgagttagtatcaataatagcgcacaagaacgagttgtattactgggaagtaaagtcgtacgatcgtgcgaattgttgctatggaataccaattttcgtcaagtcacagtaagcatcaaagtaacacattcgtacgatattacagatataatatctttcacttaagtttatccttgcagtatattatctatccttgaactatcacgtgtataatactttccttcgatccaagttctattaaaggtaaataagaattttatgatatcattttcgtacgagaagaattttaagaaaaccaaggtccgttctcgacgtattgacactaagaattcgaaatgtaatttttgctttgttatgcttttgcaaagacttacgactctactgcatacgtcttgcagctctagtattattgagtcatagcaacggcaggcgacgccgcagaacctggtcgtgcagacctgcgtttgttcttcggctttggacccggcttcatgccacgcttccctaagtcagcttcagtgacgatgacttcaggtactagcagttgaagatcctgagcgatggtcgccgagcggacggtcgggacaaactggtagtaatatgtccgccgcgcgaccgacacggtgtgttccttccaggcgaaaagctcgctcacgtgcattccgtgatgaattgcagctttgactgcatggacacacgggaacatcaggtcttgccagcgtcggcacgttgcattccttctcgatcaagttcacggttcgccacagatgggcgtggtccggtctgctgctgatgtccgtgaatcgcaccatgtactggccatcaaggcacggcaaaatctgcagggttttcgtaagagccatgatcccgtcgagcttcttcttgtaggtgggaaggagaaagtccgagaaggctgcaggggtggtcctcatcacgtcaatttcgcaatcgtcgtacggctcaccttgggaggtgcttgcgtgtcctgcgttgctacctggacccttctgtcgcgaggaggtgcggcgcctttcggcgaacagctcaaccaccttgacgaagtattgctcgaaagcttccaaggggtaggacgaccgcactgcattgcccaaccaactgttcgctgcctcggacaggttggaagtgacctcgtcataagagggttggttgtacttctcgttgaacgcgtatgtcacccagtgcgacttgtcaattccagcgagatactccacagccaaagggcgagtctccgagagttttgagctgtaaaacttgtagtcgttctcgcattcgctacgtgccatctgaaacacaagtgactgttctgccggcgtcagcgcggagcccttcttctcgatgtgggtgataatgtgcccaacgcaaaatcgatgtccggaatccagatacaactccgtcacagacgccaggagatccttctgtctgtccgatacgaacacaggtttccacgccgagacgtcttgaagcgcgtctttcatgttctgcaggaaccagctccaatgcgtaatcctcttgatcgacaatagcgagtccgaaaactaggatgtggctgtggtgtagcgggatcggccaaaatctggtgaagatcgaatgtattggcgtgacgcggggataggttgtggagcagcgcgggaatcttcgctctgcgtccgagtatacgctccgatcgagggttgttcgctccgatcggtcggcctggagtcgatccacggcctgtagttgcctttccgggtgtgttccttcctttcgtgagttgcttgccgcttcctatagcgggatcgaggttgatcgagaggagaaacgatcgccggccaagcagtatccggtcgatcaagggttcgcacacaagaaatagatcgctagagtaggtcaagctggccaatgtattaatcctgtcttaaccgtaccactagctcactgtccaaagtgtcgatgcttgccgaggccaatgtagttccagggacttgacgatttgaggggacttgtgctcttcggtgcaaattctgctctgatttatgtttagctggtgtctctctaccactaccatctcacctaccatcctacaactaaacaactactggattcttgtcctggcttcgcccccatgtgctccccatcttggctgatcggcgatcgacgatccacagctctcgatcgcgatcagtccacttcggtcttcagccgtcccactctacgatgtcgctcgttgatcttgccctcgtgcatgacatccttcgctttcgacatgcgcccttcgcaccgcgcctcttcgatcggtgtgggacgaggcatcaccgctctccatgtgtcgatcagctttgatctacctggttccacaccccgcctacttgcgagtatcatcccggtgcctcgatcgctcgtcgaatctcctcgatctccgcaatcccagtcttgttcaggtcgcccttctctcgatcattgatccccttgatttttggtcgatcgtttatgccgcctttctcagagaacaaatcttgttctcgcgcttctccacatggccttctaggttcttcgtggtcgccaacagaaacactccgcgcttgttcatatcacccttgagatgtgttccgtccagaccgatgacgtgtcggcagtgtacttgaaggcatgcccctggaaaaacgcaagcccttctgaacatgttattctcgcgcctgccaaacccgtagcttgtcttggagttcgcatcactcaccatggctagatatccctccagcttctggtaactcccgacgacgtcggcgcgcagcgatttgagaagatcccgcttgatcttggatgccgcagttcggttcgttatcatccccttagtcatcaaaaagtcgatgatagcccgccctgtgcccgaggcccacgttccgctgtaagaggggagcaactcacgctcaacgacgcccctcatcactcggtagggcacatcgcgaaatcgctgacgggaggtatctcctgcgagaccgccttcaacaaaggtatcgccctgaaaaccgccgtgtctgaagtggtcatgggccagacacatccttgttatcttccagttgttgcggatcccgtacaccgtaatgaaaaatgggcagttggcagtgctgcctggaatgagctgctgctgccctttcaccgccttgcaagtgtacttggcgtttccttcttgacgacgagagtgatagctgttgttggccacgcgaatggaaaagccacgggctcgagcaaactcgcgacagcgttgcagcagagcctttttcgactcaaacgtcacagacgcaacgttgttcccatggtcggaaactacgccgtaagaagaggggtcgcggggatccaagccgacatctagctcaggtcgtagcatgcacatctcgataagttcggcgatgtccgcttcttcgacagcggatgaggtgatcatgggcgaagacattgtccgggtgaccgaaacaggagaggtggtagaggtgttgaggcgtgtagttgggtgggtatccgacaaaaagacgaatgagccctgcagtgaaaactcgcgagctaagagaacacgggctaaacgaggtggttatgaaactcctacagagatgtgttgctaagctccggcccaagatactgaaaaaaagtatgaacgtccgtttcaaaatgtacgacaagaagctcagaataccgcgaagggatatgctcggaatgcccgtccgttttaaaacttacgagtcgtaagttattgctgtcgtacgttacaataaacgtaagagtacttaacagaggcgtggcctgctcagaatgcccgtccgttttaaaacttacgagtcgtaggttgttgctttcagacttttcaacaaacccaactgtacttatcagacgcgcggccgacgaagttttaatacagaaccaagtgcgttagtttggtctgcgtgcatacaattctacgaagcgatgatgtaaacttacacattagcattacgacactcttactctaaaaaggtaatttcgtacgatattacttggccccggaaaacagttatttttgcccataaaattaacgttcaattcggatatgataaaacgttatttatgactgtggcaatctacttgcaaattgatgcattcacctacttagacttttacaaaaaggcttcaatctacttgaaacttaattcctcgcgcgtatgtcatctcctgcatgatttagcacatccagcatggattagcatccttttggcactttccgaaagtgccatttccgagccaagctggcttcgaaacacgactccaaagccactatgatttaccactaagtacgaacactatctagtgcactaattaggagggaaaaccggttgcaaagcacaatatcatagagcacatatatatcatagagcacactttcgattatccaatgaaagccatataattcacacttgaaataagacattcaatctcggagcctgatagccgcgctcgttgcgttacgccattttgaatggcgcgaacaggtagaacgcgcttaaaaagtgaaggtgacgcgcggccaaagcagtacgagcgctcgttgcgattacttaagtacgtacgagttcaagctgtgggtgcttcgattcctagacactacaccgatggcaaaaacggtagctaacggaaaacgccaatttgtataccgcatactattgaattgaacacttgtcaaatctagaaagatatacaaataggaagggggttatactaccaaagtagctccgacgcattcaagtctgaaatattgtgtgtagagctagctacgttctgcaaaatctctttgatggcatcctgccaacgtatgtaccagtcttcaaaccatggagacatccatagattgcgcagagttggttcacaacgtctctcatgccgttagatgcaagcagaacttagaccaacaaccaaaaccatttttctttgggtaccttacggtaattttgcgtaaagttacacaaaatgcaaacagtaccgaatacaagtgtcagtttttaaactgtggtctttaaaaagataaaaataaccggatcttgcttgtcgtatttgacaaagtaatacttacacggaaaataaacggtgattttcaattttaagacatctcttagccaatcaaaaggtgtttacatgctaaacttcacataaatttcaagaaaattataagtactcaacgttctatacggtttggttgaggtatacaaattggcgtaggtacaatagctttgtatactgagcacattctattagatttgagaggaggtattcaattcgggaagggtacgctatttggcgcgatccgttaagtattttcctgacgggaaggtgattcccttcatttcattttcatccgggcttcaggaacaaactttgccaggaggtatttcaccgtcttggccgcgatagtttccgccagatcgaaggtcactccaggaatctcgtacacgtccatgatcttcgtgaatattaaccctatcgttaacgccatacatttctgtttgaagggacaccatacaaactttaagtaaaacggggtaaaatgatgcatgaggtatcattttgctgtattaggtttgcgaggccaactgatcaaaagtatacgtgatgggaggtttgaagcgacctttcgatcaaaaagatacgtgaggcatcattttactgcttctctgtgattcgctgcgaatcgacaaaagtatcagtggaagcagtaccgtgagaacagcaccctaacaaaactttagtaagagcagtaccgtggatcacagcgccatcttgtggattatgtggggcttttcctagttgtgaagcggcggcgccgtggtctccgatgcgacgctggcgaatatggcggctgtcctggacctggccggagcgtcttcgacggcggcgacaagcacgcgatgactgcgggcatctcgggcagcgggcgaaatggctacgggagcgccgtcaccaccgtcaacagcatggtctcggaggcttccgcggcgaccgtggccgtgttggacgtgatcgggggcgtctccgctggcatggtcacgaacgcgacggtggcattcggctcgggcagcgagcgcaacgacagcggcagtccgcatgcaggttgccgccggtagtagcgtcagcagcgccgccagcgacatcgacagaagggtctcgtacacgatggagatgaccgtggccttggtggatgtgggcgcaatgggtatacgtgctggagcaaaggatcaccgtattcagacagctttgggtttcgttagaattatcaattcacactagatgaaacattacttgagatattacattcaacttaattgcatattgctctgttactagggggaggacatagtaacttcagtaacgtgttttcaccttggagcgtcctgccctgtgaatcaactggatatcacccatgatagcggggaggccaaaaccagcgcggccttagagcttgtggtgccaagtcgagaggttgctcttgaagccattggggcgagcggtggtatgcgcgcttctcgcaagagcatgtccagtgagcttgatccttgagttggtccgccagcatatcgactctgtccatagctgtggctagatcggcaactatgttgtagcgtttctgcaagtcaaggccttccttataatggttcatgagggtgtcgtgtggtgtggaagggtccgcctccatcgcgataaagcgctcgatatgttcgtcttgttcctcgcgataccgcaacaagttggagtttatacattttagacgtgcccgagtttgcggtcgcgtgatctacattttcatatcgaatacaaacatagatatcattacccgtaaccagccacgatacacattttggcttacctcagacagctccatgcacgtctcctgccaacgcatcatccagataaagttgtgcgcacggtcatcttcaccgcgacaaatcgccacgtagaggtcgttcatctctttcacgggcagtgcaattatgaagtcgtctatgtcgatcgacgtgccacatctcgcttcggttctctacaggtaggcactgattagctttagccaaacgttattgcgtagctacacgaacttacccgctctcgcccagaaggggtcacaaatactggatacagattgtcgaactccagttgctcaccggcgctacacaaagccaaagactatatatgcgatgagcatcagcacggccgaaacaatgtcatcactaccatttcaagcgtcttggacgatccgtaaattcgccttccatcgcttgcatgcgtcttcgttggtcctggcaactatccatacatagccgttcgtattagcactagcataacaacacgatgccgaaacagccaaaacacgtacctctacattcggtcgttgatgctgtcgtgcaggaactgctccagcaagtagccgttggcggcgtgcagctcgacgccgtcgaagcccgcgctgatggcgttctccgcggccgagcggtagtccgccacgatgcccgggatctcgctcgtctcgagcgcgcgcggcggcacgggctccatgcgtccttcgcgcgtgacgatcttcttgccggtgcggatgttctcgagcttggagctggacgacacgggcaggacgccgcccggctggttgagcgggtgcccgacgcggcccgtgtgccacaactgcaggaacatcctgccgccctgggcgtgcacggcctcggtgacgtggcgccaggcctcgacctgctcgggcgcgaagatgcccggcgagccccaggacccgcggcccgtgggcgagatgttggtggcctcggcgatgatgaggccgccgggcgtcgcgcgctgcttatagtactcgacgcccagcgccgtctgcacgccctcctcgcccgtgcgcaggcgcgtgagcggcgccatcaccacgcggtgcagtagctgcacggggtccttcttgccgtccagcgtcagcggcgtgaacagcttggcggccatgttgatcgggagatctgcggagcaagtggcaagatcgaaagtgtcgatgtgcagtcatgaccacgcatccaggctcacctgtacatgtaggcttgcgtcatcgacaggatgacgaaatcgagcgtctcaacaacgggcacaaagctgcttcggcttggtgctctggggtgatcgctgtggtgacttgtacaggagggcaatgcccattgggcttcaacattacactgtcgagggctccgcaagcaccagatcagcgttggcagcgcagccgtcaccctacttgcacacacaggcgaagaaagcacggatgagttggtcttcaatggaaaagaaagcagagtgagttctctcaagcctccaagcctcagttctgaatttgcgttgtggcggtcttagaggtcttcttcgggggagttgatgcgtacgagctcgatcttctgggggtagcctggttggctgggtgtggtcacgatttgtgcgagaagcggaagcgctcaaacccagcgacaaaggacgctggccgcgtgcggaagaagaagaagggaagaaggcagtctacgcagggcatatattttcgcgcggaatgaccgaatcatggcagcccacaccggtcgggctgcctacgcggctgcgatgcaggaggcccagcaggcatcgcggatggttgatggggcccctgttgcggcggcggcgggtgggaatcacttcacggctgtccacgtacacaactacgctggagctggttttggttatggagctatacccgaatgactccagcctggttcatcccgccactccaagtattttcatcgatttagaggaggccagagaccaccaagaccagtcgcgtcagcatcctccgagtctcgtgtcgaccaagaagagcagaaggaaggggagaagaagacgctcgggttgctgctgaaactaaagctgccaaggctgctgccgctgcggaataagccgctcgccaggaagagcaggcccgtcaggcggagatcgagaaagttatggtgagtcaggtctttggcgtctgcactgagccgacggggcagcctccggagggtgcaaatacgagttcgtacgccttaacgctgatgaaggaggctttagtggcggctacaacgtcaatacagacaacaagatattatcgttctattctcctcgagctctactgcagataccattaccttctcaggcctggaaagtttcgtggagtgaccaccttcatcaatcaatgctcctgtcgtaaactaaaaccattctttggcttccagcacttttgcctctgataccggcccactcttctcgtaacatggctccatggctcacccatacattacactgcgcccgcttcaatcgtccgtgtttccgccacttcatcgctcccttctttcttcatcaccccatgataatttacgataatttacgtttccctgtgttatttccttgcagtactctcgccaatgagttattaataacacaaatggctcgaacgatggcaagctttcccctctagagcttcgctaagttggatcaaacaccagatgcagcgtccgatctgaatacgcttcaaccgaaaatgcctctgctctagcagaaactattgcggtcgaaacggcagaagacctcatagcaagttcttatcgaaaaggacatggatcgactcgcggttgcgttggtctcacgatacgtcgagaaagctccaaacatcttgctatctatctgcccaatgctggaaagaggacaactacgcaacgtacaagttgtatgtgtgtcagttacgaagtcgaatggtgtgtgaactcgcgttcaggtaatatccaaaataaatttaacgttagctactcggccctggttctgaacttgtgggcgcggtgaacaattctccaaagtttccggagactacgagcaagggtcgtcgctggatgtttgatcccgccctcgacattggggccacgtccaatttattgaaatcctaggcaggtgacgattttgttgcgcagctttagcggagaacgggaacttggagtcggctatcattgctgcggaggtcgtcgtgatacatcttcagacgcttcgggtcatcgtctcgaatttcagcacacttgctgcattctcctgaaataaaccacacaaagcaaatgaggccagtacgactcaggcataaggggttggatactggagttcttgtcgttggcgtagtcgtgtccggccacgccctctcagtcaaactgctgcatgtatgtacaatatcggaccacgcatgaactcgtggcttgctggcaagttgccgacggcaatacgttgttgcccttgcacttcttgcacctgcaaagcaagcccgcataaccagagtcgatgaattaccatgatccagtagaaaagtactggatcgccccccaggccgaccgaaaaacaaactactgtcacagtatttgctaagttcgtgatgcgtatttatcaagacgtatctacctactctctgcgagactggatccttgcgctgcgtcgtgtcggtcgtcgatggtgagtccgacgtctccctcttgtcgattggtagacccagatgaagtcgatcgattcgcgttcgaatcgtagcttcaggcgcatcggaacgtggcttcccggttcccatgtaagctcccggtacccaacccattggatgagataatatactcttacgttgatccaccttttcgcgtatattcgctctacctcacatccacgcctctctgggcccttcgattgcttgcgaagaggccaccacccctacgtcgttcttctcggagtccacccccgactgatgattcttcctcttcctgctcgtcggtgtcttcgttgctgacgtcatgagcggaaataccgggattcagtcggagacggtaaaacgagccgtccaggcggcgctggatgttccgggcgtggcgctgtcgtgggttaaggcgtggcattgcgcacaaagcagaatggggcttgccgaagcgctgaaaatgtagttcgcagtctatttctattctaagtgttgccttaaaataaatacagtagacttcagcccggaggtcaggttgtgatttggctaaatttaacgtagttaaattgcaaaattcagattgcagtagcatattgcaccattgcggcttaaattatacaaaaagggtgtaccatggagtggtacattcgtagagttcctactccttccagagtttaagagattttcacgaaatattttactcgcgtgtttttagggtaccacactagagatctatcggtttagatttttaatataccttacccaaatatgactcagcaacacttgcatatttgattagaattgtcggaaagcacaatatctattaattatgaagtgttgtttgtcaaaaatacagatcgataaagtataaattggctttgcccgacgaagcttattcttgtccctacagcgcgttttttacaatctttcgcttgtgttgtggcctcttccctggcttcaaccctcttttaccaatccgttcaggagtgggttcaaattgtggaggaagaattgtgtcgtcccgctgtaaggttgctgttgtcgggcaagggagaaatttgaatgtgtacgaatcgcggaagtgctcgatcgacatacgcttggcgtcatacaaatcttcgattcgtcggccatccttggacacaagggaacatttggtcttgccaattgccgcacgtgcactccagcgctggcaaatccactacccggtctgggtgaacatatcctggtatggcaacagggcccttgaacaagacgctgtacgcaccctcgagaaggggtgtaaactcgcacatatcagctgcagcttggcggtctgtacgtcgctctaacaacttggggactaaatccgagagtgcgccagattttgtccacgttacaatcaattgtcgccttttggacatcagttgactcagcttcaagaagtacaagtggaatccgtccaagggtttggcggtccgaagctctttacccatccagttgttcgcttgctctgacaaacttgaggttatttcgtcgaaagtcgggagattaaacttttcttggaaactgtatttcacccagtgagcacgttcgattccgtccagaaaattcgcagcggcagggttgttcacggcgagttcacttcgatacagcttatagtcattttcacagtcgctgcgtgccattcggcatacccacgcacggtcttcctgggacaacctggaacatttcctgttaatgttgtccatgatatgccgcaggcagtatcgatggccagcgtttgggtaaattgtcgcgacagctggaagcagacctttttgtctatccgacaatatcgtgaacttttcccagtcaactgcctccttgaaagctcccaggaaccgaatccaattggccttgtcctcttgtgaaaccagcgcgagtccaactggaacgatgtggttgttgtagtctttcacggtagctaccagataaatgccctgttcgtacatttcctctttaaggtggaccccgtcaaagccgaccacctttttgcagttctgggcaatgttaataccagcgttagggatgaagcacgctcgaccaaacgacgattcgtccgcggcagtttccactctccaaaccgatccggggttcttgtgcgccatcaactcgaagtacgcccgcattttttggtaactttctaccaagtcgccgtgaattttgtcgtcaattttcggcttcattctggacaccgatgtaccgctcctttcgatttcagaaaattcctgatagcggcgcctgacatagaagccgtagatccatcgtgggcgggaagcatctcggtctcgacaatcgctgtcagcttgcttatctgctgcgtggtattccgcatgggcttggacggcaacgggatggacccttcaacacaaggacccttggcactaccaacgaacttgaggtgattgtgcgcaaaatttgcctgggtaatcttccacttccccgatttcccgtgaacattcacggaaaaccgacacgtgagttaggcagctggtgtagtccggtcgaaatattgcgttacattgagcgccttgtacgcaaatttcgcattaccggagttgtcggccttcacactggtctgcttcacaaaaatctggaagccgcacctcacagccaaatctttggacttgctgtggactgctttttgtgaagaatgactgaattggcaatattctctcggagctggtaggccaagccatacgttgagcttgtcgggttcgtcgactcgactgcaacatcgtccctgagtagtcccaactccttggcagcttcgagatcagacacgtcgagtgaaaagcgagcagagccgtagtttggggggtttcttgctcttgacttggacatttgcacaatgcagcagaatatagctgtgaatcaccctttagagaattatttattattcaagtctacttggtttttatttagcactagccttcgaaatcttacctcccacgtatctatttcaggtgtcccgcaaataaaccgagagctcaaagttagcccataaatggttgataggttcgcaagtggcgtgccgggcgtacttaggatttttttactgtatgaagaaaatggctgtcggcctgggggacgttccagtacttttctactggatcatggtaattcctcaccagagtcagaactgcgcgctctgattggctcatgccatcccaatcttttcagccatcacgccaatcagttccgcactcactgccgtctcgatgggccagcacctcagcaccgggcgcgagagcgacgtctccgcgggggacgcggcggagggccctccctcctccacgctgtccgccgccttccccgccgcgtccccgtcctccgcctcctactccgtcacctctaacgccgctgacagcagcgccaatggcccgagcctcctgtccgcccagcgccccacgctcgagccccacaaggtcgacaccgtgcagcaggacgagcgcgagggctccgtgcgcctcggcgacgtcgtgcgcgacacgctcggctcctcgtcgggcgcgcacgaccaggagccgtccgcacaccagctgcagccgctggagctgcagagcgacgacgaagacggcggcttcccgcgcgtatcgtccgtggactcgttcccgtcgccgccgtgcaacgtcaagacggacgacgcgcacccgctcaagcgccgcagctccatgtcgcgcacgccggcgccgcccaagctgtcgcgcttccggccgtccatggacatcgtccagtcgcccaagtccccgcagtccggctacctgtcgagctcggactcgcgctccgtggactcgagctccagctcgtccgacgaggacctcgtgggcagcggcgaggagctcgtgagcgactggctggacgaacccgaggacgccgtgctgtcgccgccctccatccccaaacgcgcgcgccacgccagcgcctgctcctccgtgtcgtcccatacagggaacagcgtgtcgttctcggccatgcacagcagcggaggccgcaacagcaacagcagccagcacagcatgacggggtgggcgtcgtggctcagctctccagacgacgtcgaggaagaggaggacgcggacgatgagcccgtggctctgacgcccttcttgcgcgataacatgcccgtgtaagaagtgatgagacaggtgcagctcttccggaacctcagtcagatgcagcaggagcaggtggtgcgcgcgctcaagccgtgcaagttctcggacggtgaggttatcgtggcccagggaacgcgtggctcgcggttctatatgattgccaagggagaggctgttgtgaccaagaaggttgtcgcgagcagcaacagcatgactggatcgactcccacaggcgcggggcagacgcaggagcgcatgatcacacacttgcgagcgggtcactacttcggcgagctggcacttatctacgatgacccgcgtacagccactgtgcgcgctgttggcgacgttgagctcctgtacttgacacaggaggattttcagcacatcggccaagtccacctgagtctgatgctgcagcaggtgccgttgctcgcgagactgagtgcgcaggaccaggacatcgtgctcaagtgcttgcggccagcaaacttcagtgatggcgagtacattgtccaccagggagacgaaggcacgcggttctacatgatcacgcgtggcgaggctattgtgtcggagaaggctgtggggcctgacaagaaaccgtatgaaaaggaattgacgcggctgtacgagggccacgttttcggcgagatgtcgctcatctacagcgagcctcgtacggcttcggtgcgagcggtgggcccagtcaagtgcctgtacctgagtaaggaggactttgacaaatgtctcctttccgaccacttccaacggtttattcaggaagcctacgtggaaaaggctacgcggcgtgccatgcgactgcgtctgcagcagcgtgctaatagtgccgcatccaatgcccccacgccacaggccgaaggttccggagcgaacagttcgtcaggttctattgtggcgccgcctccagctcccatatcacccgtgaaagcgacagaaaccaagaagctgttgctgtatctcgctgctccgtttccacgactagtatctccgatcccagacccaacgattgagaccacactccgcgatgccaaccgcctgtaccctacagaccggccttgctggggctggtggaacgcttccatcggtcctggaaggacatggtggcgatgtatgtggcggaggctcaggacgattgggatcagtggctgcactgttcagcgtacgcgtacaacggggcgagacactcgggcacaggctacagcccgaatgagctcatgatgggaaggaagctgcgcgcgccgagcgagctgcttcgcagcagcggcgtcacgcagaccgggccgtttgcggtgtactaccgcaagctggtcgacaacatggcaagggtgcttagcctgtagagccttcaccaatgagtccaacaccttgccgttcaactccggcgctccgtccatgacgacctcacgcatggggccgtacacgaacaccaacttgtccgcaatgaacttcgcgatgtccggcgcggtgtgcgtgggcacagccgccaccaccgcatacctcgtagcgtagtctatcgccgccactgcataccgattgcccttcggcgtgacgggcaacggcccgccacgtcgagcgcccagcgatcacctgcatttcccacgccctgatttctcagcaggggaatcacctccttcggtttcgtcttcttcgacccgcagtctctgcatgactgcacccatctccttacgtaggcccgcatatctggccaccagtagttccttgtcacgcgttcgtacgtctgaggcgtgcgcaaatggcacgagtagatcgagtcatgaccttctctcaacgcagccgtccactgcgccgtaggtagcaccactctcttactgccgtcactttggacaatgtggacgacttcgtcctcgaccacaatagccgtgtcacgggatttgcccttccgcctgaggttcttcaccgtgcgatccttcgcctgctcgtcacgaatgacacggttaatcagctgctcgtcgctggctgccccgtcggctatcgctgactcgttgctccgatgctcctaccgctgctcctaccggcgccctcgacaacgcgtcagccacgacgttgctcgagcccggcctgtagataatctcgaattcgtattcttgaagttgtagagcccagcggtgcagccgcccggtccactccttcgacgtcatcaaccactttagcgccgcgtgatccgtcacgagctcaaacttgcgtccgtacaggtaaggtctaaacagtttgactgcccaaaccaccgctgcacattctaattctgtgattttgtacgctgccactatctccgaattaatcttagaagcgtaagcgatcgattgctcgccctgcccctgatattgggtcagcgcggccccgaggcccaccttcgacgcatccgtgacgaaccggaaggtcttcgcaaagtccgggtaggccaacagaggcctctgcgtcaactccatcttcagccgctcaaatgcctcttgctgtggctctgcccatcgccatacaaccaccttccgtagcaatagtgtcataggcgctgccttactcgcgaaatccggcacaaagcgccgatagtagcccgccatgtgtacaaatctcttgactgcagcagcatctgtcggtgttggaaaccgtacgacgctgtccaccaaactcgccatcggcctcactccgtcaccgtcaagttcatgtcctaggtagttcagacgtgtcgacgcgaaggcacacttgcttgccatcagcgacagacccgcgctcgacaatctttccagcacagacgccaagtgcacgacgtactgtgccacatctcccttagagaagacaataacatcatctaaatagaccaaacagctttgccatgttagtccccgtaacactgcgtccatcatcctgacacgatgggattggagattttcgcggattcccccagctgcgcctgtgattggttggctcagaggctcactacgggagagggaggcagcgacacgtggcgtatgggaaaagcggatcccggccggactcgcgttggcagtgtacaaggtttggtgaccctggatggagatgtccccaagagcggaccccggctggaaccaagtaccgaacgagaggcaaagcccaagggagcgtagaagtgcctccgactggaggccgcctgctcttggtgcactgtacaacgcaagaggagcccgaccggatctagtgaagacccagaaactgtgaagctgtccaagacatcccggatgtgaagcccaagtggagtgtgatcccgtttggagataatcatgaatcccgaatggagataccaagataccatcccagatgtgaagatccagtatacaaagtccaagatgtttccgaccgaccaagccgaccagccaagatctgttcggattccgtggaacattgaacttcgcttgcgtaccaagtgatgattatacttgctggaagtatgttacgagggaccgcggacgattacgacgacaagaccatagcgaagacaagtcaagatagagtgcatgtaaagatcaacagaagatagccagacagacagagagagagaccacagataacatataaacagagttcgttttgccaaggatcgcgcaagtgagttggagcagcctaccgggcgtgcattcccggaggaccgactaagtctacgtgtgagggcccacatcagggtcgagctcccgcaacaaagtccagtccaagttggggtgagtaccaggcgacaacccgaggttgatccatcccatttcatttcctgtttgcggttgagctcgtccagaccaggaaggccccgcatttcatattaccgattactttgtcgccccggttggagtagccccgggtggtaagtacggatttaagagctatcgtgtgataggaggtattcgattgtgttagtttccctcagtacttgagggtggtgcgcgtgagccaaaaccgaccgggattgaccagtatcccggagtccggctggagttgactggagtagtgaccgaccctttcacggttcaaaagaataaggaagggctacgtgtttgtatataactctgtatctgtttgtattgtttggttgtctaaaggctgtcagaggcgacgtccaggaaggttacgttctgccctgctacctagcgacctacaagtatcaagacaactcatccacggtcgaagacccctggttacgaagacaaacgaacccacagggatggttcacaaggacacacgccaccccggttggagtgtacatctaggtgtactatctccggctagggtttgttctgggtgcaccccattcgggagtctacacccgggacgctctaaagctatacacctgggcggtcaggcgttcacccgcctcgcctcagctagtgcgcgtacccggattcgaaccagggatttcaccggagtcgtttatattttgtaagtttataggtgtgaggtgtgctaactttcctaactagcgtctatgacagctaagcgaggagacatgcgcgaaggagggcgcggaggacgaggacgcggagaggtgtcgcgtcagtcgcgtcgtgcggcggggctgccgcccgaggagcaaccgagcctggaagaggttcaacgcaatgctcggagggttaacgctgaaaagcgcaaggcggccctggccggagatgggtcttcgaaccaagtccagccggcacccgagccagccgtcccagatgacgcgcaccaagtgtcgaaggacggcgagcccgaacgtgctgacgcgggcgaggagtcgaagaccgcagagggggatcccggccagggtgaacccaaccaggcgtctgagggaggcgccgacgtggatgagccccaggcggagggtcgagtttcggactcctctctgcctggccaagatgcgcagccggacgcgcaagtgtccgccgaacccaagccgacgccgtctgccgacgaggagaagccggccgcagtccctgcgaagacggcgaccccggccgctgatgcccaaccggagacccaactctcggtgaagaccagccggggtaacccgccgacggagttgccagccgagcacctaagtgtccaagcggcgaagacgtacgcggcgttgcaggcgtcccggtgggagagagcccggtctgggttcacgcttcctccgaacgtggagtacgcctgaccggtgtcccgtccggactccgtgctgtggctgaccgcgacgcttgcgacgtccaagtacctggcgtccaaggtggcctcgcaggacccgaccgaagtttggttggccgacctggcacccagccgtcgggacctgtcgactgcccaagacctggccggagtccagatcccgactgggttgctggactcgcgggagtgcgttgcggtcctgcagacgctcctgttcgaggccgggttccagttcgtcaacgtggtgccggcctgggtggagatgcgagtgtccaaggtggagccgatgtctatccggaccctggtcggagacgtccagcgattgcttgcagtcgagctcatcgagcggcgcgagcaggtcatcggagcgatgttcaagatcctgccagcgttggaggcccaagcgaagacagagaagccgccgatcatggattaccacgcggaagacgcggatggagatctattgatgaacgactacgaactcttgctgggccggacctacgtcctatgactggtcttcgtcccatccggcgtccgagcgggtcgtccaccggtgagcctgcgcccaagcgtccgtagcatgcgccgccgagggccgagagctcgcttgcgtccccgccgtcccagttcgagtcgctgccgtgcgagttcccgtcggctgaggagtccgcccgggatgccccggccagaagtgcaacttcggaccttgtcccgagcatagttggcacctccgaccgggcttcctatggcgcgacgtccaagtcgtacgtgtcaaggaacaccacctcggactcgtcgacctcgaaactcgggtacagcgctgcgtcgcacatgccgatgccccagttgggatccttggcgatgtccgcccggggtccggttggcgtgtcggtcggcgctagagacgtgggcttctacgtgacgcgcgaggtggtctccaaacgagagccgacccccgatcaggctgatgccaacttggcacgcttggacgaggtggccagccgggcgacatccccaacgcgcacggcgacgaggtcccggacgcaccgacgctcatggcgtgacacgctctcgagtggctcggaatcggatggagatgctcggcgtcgccgccgacgttccatccggaggtcatcactagactgatccccatccaggcgctcgagtcgatccaggcgctcgtaccggtccacccggtccgaacggacaagcctgtcggcccagtctgggatggcggagatggcggtgtcgaccttccaccaggtccagcagcttggtgccgaactgtcgaagcttcgcgaagctgtgtcgaccgggaaggatcccagccgggatgccgaagccgagcttgctctgaccgaagcccaacgggaggcgcgcgaagccgagcgccgggcccaggagcttgagcttgagcgacacctgcatgaggtctatgcccaggcgtcccaggccgcctcacattccctgacggccgaggccaacgtcgaagctgctcgtcttgaagctgcgcggaccgagcgtgagcgtgtggaggcagccgccgcggagtacatccgccgacagctagctgaagccgacgcgagacacgccgccgagatggccgtccgggccgggcaggcccagcaggacctggccggcgttggcagccagggtgcaggcgtcggaagtcgcgcgtgcgcaggaacgtgagtctgctcagaatatccagcgtttccatgtgggacagatacgcgaccttcaagcaacatctgcccaagctcaacctgaacggggaacatccgaccctaatcgggcaactcccatacaaacggaaagtgataaccctgaacgggcaacgggcataatcacgggaaacgcaacggtcgcgagtgcacagccgggacagaagatcacgaccgaagccggctgggagcagctactggcaacactgccggaactcgacgtcgcgcgtctagcaaggactctgaagccgaccgtggtgaagaatgagccggccgcagttaatgcggcacaccgatctactacggcgacgcaggttgccccgacggggacctcccgtccggggaccaagacgacggtgaagaaggagccaacggagccaaagaaggatccgcccaggaagaacgaacgcaggaaggacgagcgcacgaaggacaatcgcaagaaggcgccacgcaagggacgtcgccgggatcgcgactcgtccccggattcaagctccagttcctcgagctcggatgatgatagctccagctcggacgacagcctggacgacgaggacgctacaccgaccgtggagtcaactacggttggggatggcaagacctcctggacgttccgcccgtatgtcaattccagcacgctgggtcagttcgacgagaaagccccgcttggagatcgacgtacctggtgggaaaagttcaccaacatctccgtccagggtggttggtccgaccagaccaaggttcgagagctcaagatgaagctgtaacctgccgcccagaattggcgcggccaactggagaagcacgttcagagcaattggaaacgcttcgtccaggagttccgtcgcaagtacctgaagctccggacgtcggagtctgaacggtattatactatgcgacagaagacgtctgagaccccgatggagttcttcaacaggctgaacgaggctgcggccaaggcggggatcaagtaccggaagtacaagaaggagcgcaagcaacatgccaagcgtttcctgaagaatctccgggactcccagctgaaggccatcctggctaaccagaagatccgcagcctgaacgacctcgaagacatcctggagcaacaagaggacctgaacctggatgggggctatgatacgccaccgcccaggcgggacttccgagcgggcaacatccaggattcccgtttcaagccgaggcgccgcgcgtttgtggcaacttcgggcggggagtccggctacgaatctgaaggtcgtgtacgtttcgaggatgaagtcgaggaagccaagctgtcccacgcggagtcgaaggagcccagccggagtgccccggctgaggtggcgccaagtgcaccaaccgttgctcagatcccggagcccgaactccgtcaggctatcttcaaggcgatcgagcagagtgggtggcgcccgcctacgcagggcgactcccgtccagggtggcagtcgccccggccgggatggcaaccacctcggcccggatggcagtcgccccgacgggaaaaccctgaccggaacgaggtttgcgagaagtgcctcaagtttggccacaaagagcagaactgctgggcgtagatcgtttgcgaccggtgcaactggaagggtcatccgggatacgcgtgtcgagtgaagccgtgctaacgctgtggcaagattcatgaaggaacctgtggagattacgaagccttggaagccgtgaagaaactcgctcggaaagggatgttgcaagacctgcctccacccctgcgcaagcaactgctgggtgaagaggccactccggggtcgccgttaaactagtaagcacgctggatggggatccagaacgcgccgggctggcgaaacccaaaggattgtgtgtcttagttaatgtcggacccgagttgagaaggagaaaaccggataaccaccaatgcatgtcagctatatttcaggaccagtttgacgaccccaactgtacgaatcctggacgggaaaacccggatggcgatgatcaagtcgaagtcatcctacagcccggacagagggtgggaggatcacgagcctgaagagagtcatgaagtggcgacagtgcatggggcggtgaacgatctccgaacaaggatactcttggacactggtgcatctggaagcatgattagcttggaccttgcgcgtaggctcaagctgaaattccggatgttgccggagccgatcagggtgtccggattaggaggtgctcccacgaacattacgtcgtatgcccgggtgaagatcactctgggattccgcgtggtgtatgtgatgagtgtctggttggcgagtatcggcgaaggattggaagtacttctggggatgaacttcatgtatgcggctcgagtgtggttgagcgtgcgagaaggactagtgcagctcccggacgaagaaactgttgtgatgtgtgatggtccgcgccgcgacaaaatgggcttggatctcccggtaaccccggatgaggggatctatctccgtccgggggaacatgcgatcgtgaaggttaggtacggccagaccaaaccccaacgggatgttgtgtgggccggccggggtgatcgttgggtcaccaagatcctgtatgctaccaagtcgtgggcgtcttcggtgaaggtggtgaacatctccaagcagagagtgtggattgacaaccggactcctgtggcccggatcgtcgagtttgggcactttccccgatttgggagatttgtccggccaggaagcaaacggtatcaggagtgacagcagctgatctacgagaacattgtgtctccggaagcagaggcacgttagcaagagcagctcgagctcgagtggagtcggcaacccccagccgtggaaaggccgcagcgtgaatggccgaccaggattctcctacggcctgagtcggggtcccggacggaccggctggtgatgctccagcagggcaacgctgagtcccaggcgggatccgtcgagggagtctcggatggagatgataaagaagcggaatccggtcgacgtccgactgtcgaggacgctcacagcgatgtcggcactgcagctgagtctgatccgagttctgatgagtggaacctgagcgtctctgatttggccgagtccggcctggatggtgaccgctcggaaaacatatccgaccgggaagaacctgacatacccactgcgtcgatgcctagtaccccgctgcggaagctggaggaagagcacaatcgatgcatgcgaatcaatcaggaggagctcgacctggaagctggagtgtatgtgcacgaggggagcgagttgttgtcccagttgcgtgacgaattggccctgcttcctgagttgaaggacctgagccccgagtgtgatatcgacaaggctgatgttggagagcccggacggactaccccggatggggaacaaaagttgcgctctatactcaagtatcaccgcaagatctcccttggggatggcaatgctgcgccggccccggccaggggcgtggtgtgtgacctggatgtgggtgacgcaaaacccgttgctcaacgaccaaggtccattgcccctcacttgatgatgaaggtgtacgagctcctgaagaagctggtggaaacgggtctgatcgagatgtcgctgtcgccgtgggcttccccgattgtaatcgtcctcaagaagaatggcgtggacatccgaatgtgcatcgactaccgggtggttaatggattcatccggctttctagctacccgttgcccctgatcgatgatcttcagattggattcgaagctgctatgtggttcatgagtctggacatggcgagcgggttctgggcggtccggatgacggaacgtgcgaagctaatctccgcgttcatctgcccattcggacacttccagtgggtacgcatgtcatttggactcaagaatgccccacttgtgtatcaggcggtgatcaccaactgcctttggggtttcgtgcgtctcccgcgggaagaagaagagcaggtggacccggatgtactcgagttcctcggtttggacccgtccgtccgggatgaatccgaacgggagaaggctggagctagtgttcccgtcctggtggagcagatgactgtgttccaacgcaacatcccgatgccgtcccagctgggacctgtcctcggacggagttcctacatcgatgacattgcgcatggggcgcccacctgggatcagttgcgtgaggacctgaatgcgctgctattccggttgcgctattggaacatctctgtcagcctgcccaagagtgagtgcgggaaggtgagtatcccgtatctctcccacgagatcagtgccgaaggactgcacgcgactccgaagatcgcgaagggcgttcaggatttaccgttcccgtctaccctgaagggagttcagtcattcctcggaagcctcaactactatcacaagttcattgaggatttcccggttgtggctgcagtactgtacgagcttacggatgatcaagtgaagtccggccgggatctgtcaagggcgaaggaggcattcgagatcttgaaacggaagatcgtgtcgacacccctgttgcgacaccccgaccggaccaagccattcgtgattatcccgcataataaccgctgggccgcctgcgctgtcctcggccaggagtgtgatggagtgatccagcctgtgaggttcacggggcgcgtaatgaacgacgcggagattcgataccacatcaccgagaaggaggcggttgctgtcatgcgagttctggatgtgtttaacactctcgtccagggttgcccgatcaaggtgtacaccaggtactcagtactgtcctggctgttgaagtccaagaccgccgacgggcgacatgtccggtgggggttaacactatcccattgggacttggaagtgcagaaggtgaagcgagacgaagacggcctggctgcaatcatgggcgctggcataacgccgcgtgagcacatggacgaggttgctgagtcgctcatcccggccaagggtcaagtgaaacccccaccggtgatcagtgtggagatgctggaggctaatttcgctggatacgtcttgagtttcgacggagctgcgaagacatcgacgaggcgaggaagttgtgggtgtatcatctgggagctccccggctggaaagtcctggccgcgcggggtttcatcctggatgatgttacggtgaacgacgctgagtacctcggcctcctgatgggttgaagatgatccacgaccggggtatcccggatgtggttgttgtcggagactctcggatcgtcatccaacaggctcaaggactgattaactgcaacctgccaaacctgcagcgacgtctggccgagtacgaggagatgaaacggaacttcgcctcgatccggctggtacatgtcaagcgagagtacaaccaggctgcagattacttgacgtccaagacactggtgctcggagagtcctgtgcgataaatgacccggacgagatggaacatctggggcgagtctctcgtatccacgaacagatcatgaagcctgaagtggccccgagcgacgatccccccgacgagcccagtcgggaatctacgactggagtgccggatgatgctggtcccgggccggagtcagctcccctgccaatggcagccagggtcatggccgcattaactcgtagccagagccgcgaggactccaaccggggtgagcctatgaacccacttgagtatcaagcggagaggtggcgccggatcaaggtgcaccaggacgctgaccccgagttggtcaatctgaagaagttccttaagggcgacctggatgacttttcccggctggagatccgcaagctgtccaagcgggcagacctatttgcgttggatgttcgggacgtactgtatcgactggtcaggtccaatcgggaccaacctcgcgacaagaccgacgagttgcgcctagtcgtaccggaagcgctccgtctggacatgttgcattacgcccatgaggatttccaaggtggccatgagggaataacccggacgcacgagaaactccgactggagttctacaggccggggatgtacgcagatgttgaaagatacgtcaaggagtgcgccgactgcgccagtggcaaagggcgcccgccgaatccaggaccttcgcccgggaacatcgagcccggagagcctttcgaagtggtctcgatggacttcgtgacccatttgccgaagtccgaacggggtaacacgttctgctcctgttccaggatgcgttttcgggtttcgttatgtgcaaaccgatgagttctaccaccgctcaggatgtcgctgaagcgtatgaggagagggtgttccgctgcttcggagccagctccctactgcgtcacgatcaggatcccaggttcatgagtgaagtcttcactcggttcagggaacttctgggtagccgacagcgagctacgttggcataccgaccccaggcgaatggacagcaggaacgttccgtccagactgtggtgaggtccatccgggcttacatcgcagaagcttaccagagcgactgggatgaccacgcagagagactcatgttcgcgctcaatacgtcgtttgatgcaacccggctggacaccccagtctacctggtccacggttgggacgccaagagtacgatctcagctatgctggggcctaaaccctccagtgtccctgaacggaccgcgtatgagtggcgaaggaaactccagcgggactacggctacgctcgggcatgtgcagaagacctccagaggaaggccaaacgggctcgctcggaagagcaaacccggaagtggaacgagttgtcagaccggctcaaggcaggcttcaacgttggggatgcagtctggctgtacatcccaaaagtgcaaccgggtctgagtcgcaagttggcccacttgtggcatggtccattcaggatcgccgaagtggttgacgagttccgggtgaggcacaaggttgaggacacgggttaccgtgtaaacccttgggttcacatcagtcgactgaaatcccgggcgttgtatcccaaacggcctataatccaaccggagatcgaagacaacgatgactttgacaccgcacttcttcccgaagacagctgggaagcggacaacgagaatgacgagtacgaagtggagaagatcatggatctcaggtggaacaagcgtacgcggacggccaaacggacacgagagtatctcatcaaatggaaggggtacgatgagcctgaatggataccgatggcacagctgaattgaggagcgctcttgtatgagttcaatcaaggggcgaaagcccgagcgcggttccaagccatacaggctggggacgaccaccctaacatacaatagttgggagtggtcaagtccgaatgaagcgaccccagttgggagtattgatcccagttggagattcccagacggagacccgaaatgcctggatgtgaatgtgtgaattacggaaaattgattgtgaatttgtatggagcgaatcaacgatggagttgtgattatggagagtaacccgagcgagaatggagttcttgacgacgagtgtatgaagttgactatgtcgccctgaaggaggtgccaaagcggcaagagatgaacaaggctgcgctcaaggttgaaccgacctggataacctgaccgaagaaggaaacgatgaagacagcgaagacgttaacggtgattgtggaattaaagtgttacgctacggatatgcagctacatccaagaccgctgtggatgctggatgggaggatgacttcactggaacttggtcgagacccagttgttgacgcgctcgtgctctggaagcagcatcttgtcgacgatcttggctgggacgtgcgccagacgctcgtcatccgtacaggtagtccactgagtccggccggggtcttcgagttcggccatcgcgatctggtcagccagggtgtaacgcgtgccatcgtccttcttggttgattcgtcgaccaagtacaggtagcagatcttgcacgggtacaaccagaatccaggctcccagaccatcgttttcggcatgccggccttgatcagacgcttgatgcgggcctcgaaggtgcgcgcaaccccgtcgtggagcgcctggcgcttgcggtggagatcttgagcccgttcgtagatcgtgaggtcgtcgcacttctcgtcgtcttcaggcttggtcatcatcatgaaccagtgcaggatgtgccagaaggctggaaggtgatccttcatgtactccacatgttggtccaggatgcggatcacagctggggatagttggtcccggcggtggaagtacatgaccttgacccggttgttaaacatctccaggcagggttccttctcgaccagggccgcatactcatcttcgactggaggccaacgcctggccaggtacttggtatcaggctgctgaggtgcgtagttaggaaacccaggcgtctggccctcgatgccacctttcttcggagagaaacgagtgccgacaccacgacgacgccacgagacaatgtccccagatggggtctcgatgatcgccaattccctgctgttcaggtcctcgtaagacttctgtgccaggggcgacttgccaccctcccgtgtgggtttcgacgtccggctgcgttttttggggttcttcttggacgaaggtcgatcaggtttatcctgcagcgcgaacttcgaccggggttccttctgggacgacaaccgaggagaccgacgctgggatgaggaagacgactggagctcgtcctcagaggagttgtccgaagatgcctgaacgcggttccgcttggggttgcgcttgggcttggacggctgctcctcatcggtgtcgctgtccgacgagctgctctcgtcaatggactccgccttggatggcccatccgcgctcttcccagatggagatgttttggccttgtcctcgtagtcggagtcacgagagtcgtcactttcactggagccgtcaacttcgacgatctccatctcggcagcagcctcctcggccaagttgcgcagtggcggaaactcctccggatacaaacccgaccggagacgtccctggagcatgacctcagccatcttgtagaaggtctcgggggcatgacgcgtccagagggtgtcgtccagggtgccatggtacaccatcttgaccagcattgccagcagccaaggctttgggaaatactggtgggccggacaatcctgacggaggatgtccaaggcctcttcgtacccatggtccatccgcatgacgaactggacatccagccggacatccgaccaagggaaaaactccggcagggatgcagcacagtcggaaatcaggcgcttgaagtccgtctggggcgacagagggagcaaatcagatcccgggtggaccgtgggtcgcatttggacgtacaccggcccacgcttgctggaaagctcggccataccgcgtggacatgaccccgaacgggaccccttggacgtacgccgcctgggcttggacggagacccatctgcaggtgggaaatccgaacggagaggagtgggcggattgtcctccgacttctcttcacgatcaccatcctggtcgccgttgccgctgcccgcctggtagttatcatcgtcgtcctcgacgtccgggtcgactgggcccggatagggcgggatcatcctgaacggacggtcagcggcctcgacggtgatgttggtgacccagtgcgcgggaggcgtggacccccgttggaagtgacgaagcagacgcaccagcctacgccaccgaccgcgagtggcagccccgccttggttcaggaactgcatcagccggtcggtgttgaaagcatcctcctggctggtaacacgcagacggtggacggccagaatcgcgcgctcgagcttggcctcagcctcagtgaccttgttgcgcagcatgtttttccttatacagatggctttgcaccgccaaggcgaagtctttctccagctgggcttggagctccaccttttccgcccggagtgcagccacctcacgctggtgatacatctgcaggaaccggtgctcgtcgacaagcctgtcgtaacgctgttgcagggtggcgcccccgccgggagatacctcaaccggcccttgaatggggatgtcgccacgccgtgcccggtcgaggatgcgatgaagcagagacgtcgtgaagaacaacttttccgcgaagcgcccgactgggaactgggccagcacagaggcggactcccggcgctacagcaacgagttcaaagtggtcgagctgcggcagcctgggagactcccggttggcatgcgggcgcagcaagttattgcgcagctccgtctggctgccaaccaggttacccaagtcgtggaggtcctgggcggagaagccgtcgaagattgctaacgcctccgtgccgccatacccctcctggatgtagcgctccgactgatatgccaatgaacgcgaccaggtaggagttgccgtcaccaggccgcttgggcgggagaacgtggcgtgaaggcaggatgttgacaacttcttgagatcccggatgggttgacgagaggatgccaaacgccttgaagtcgatcacctcatcgaacgacagcaggctggccaccgcagccgtgacgcttggcgtgcgctcgtgcagaggatcccggatgggggcttcttccatggcctcgtcctctcggacgggccggtcgttggtgtgcagaggcgagatcttcgcagaagacgccgcgctctcctcctcctcttcttcctcctcgtccatgtcgttgctgttgcctgtgccctcctgctcgtcgaccttgcgcgcagggctgccggccttgaccggcacatgggcctcgccgctagcagccagactgccgccgccgttgcccgcgcccgcctccgcacccctcaccggaggagcagaaggcgggagttgcgctgggataagcggcgcgtcggcgctcgatgcgggggcgtccatggtgtgagtggtggcgcgcagatttcgttgtgagcggagatatcgttgccgcagactggaaagagaaattgatgaaaagcgacccggttgggacagggcgcaaagaagagacgccacagttgggagttgactgaagacatccccatctgggcttgctcggatcgtgagatcttgtcatgatcgatcgattcgccgaatgaactctacaatggatcgtaacaagaggggcggttgacccgatgggattggagattttcgagggttcccccagctgcgcctgtgattggttggctcagaggctcactacgggagagggaggcagcgacacgtggcgtatgggaaaagcggatcccggccggactcgcgttggcagtgtacaaggtttggtgaccctggatggagatgtccccaagagcggaccccggctggaaccaagtaccgaacgagaggcaaagcccaagggagcgtagaagtgcctccgactggaggccgcctgctcttggtgcactgtacaacgcaagaggagcccgaccggatctagtgaagacccagaaaccgtgaagctgtccaagacatcccggatgtgaagcccaagtggagtgtgatcccgtttggagataatcatgaatcccgaatggagataccaagataccatcccagatgtgaagatgcagtatacaaagtccaagatgtttccgaccgaccaagccgaccagccaagatctgttcggattccgtggaacattgaacttcgcttgcgtacccagtgatgattatacttgctggaagtatgttacgagggaccgcggacgattacgacgacaagaccatagcgaagacaagtcaagatagagtgcatgtaaagatcaacagaagatagccagacagacagagagagagaccacagataacatataaacagagttcgttttgccaaggatcgcgcaagtgagttggagcagcctaccgggcgtgcattcccggaggaccgactaagtctacgtgtgagggcccagcaactgtgacatcagggtcgagctcccgcaacaaagtccagtccaagttggggtgagtaccgggcgacaacccgaggttgatccatcccatttcatttcctgtttgcggttgagctcgtccagaccaggaaggccccgcatttcatattaccgattactttgtcgccccggttggagtagccccgggtggtaagtacggatttaagagctatcgtgtgataggaggtattcgattgtgttagtttccctcagtacttgagggtgatgccgtctctcgagaacgcgttccagtaagttgatggagctcggtaccctgttcaactcgaccggaatcgtcaataatcgcggctacatctacgtagacgacatcgacatcgttaagatcgtcagggttggctagcttgctacaatccccaacttcccgtgtgctatgttgtaaatcagtttcttcttactatgtaatagcggtgcaatttctggacagatgctgcggttgcgaagcaggctcaggagatgcccttgggtcgtacgggtcacactaccgaagtataaccaaatgattttgtgtaccttcctattcagtatcaaacggtcttaattcgtgcacttgatcggtcggctggaagtacaggttccatcttacagtaatgtgcgtcaataagggacctctgatatgaataggagtgtaaaggctattcaggcgaacaagtggaaaaagaaagaacaatgtattgatttagttaagaataaatgacacactgcttttactaatgagcgtggagtgcaactagcacttctgaatcgtagaagctgacacattatcccacgcagactcgcaccacttcatggcagttagtaagtcgactgtatgtctagggatgcccaacgtcttggctagcaccgtagcatagaagacgatcattgcaccgctgagcctcagcggtgcaatgatcagggcggagccagggacaaaaatggggggggcatgcgccccccccatttttcggcgaaggcgtttcgatttttttagattttttttatttagacggcacatgcatgaagttcacactgttcctccgcttagttgataataacatggaaggaaagaggaaacaaccggcaatcacgaccttctttgtgaagaagccccgtcaagagcccgaagactttgacaaggcccgcagtattgaatcagatcctgggccacgaccccaacctgtaacgctgcgcgaaaaacaagagcaagcagcgttggaatggtgttcgctcaacaaaattcctgatagagccggagaatgttccgctggagactttgttaggcgggatcctgctcacagaccaccaaatatatttttcgttaagcagctgattgccgatcctcagctactgcgtgacgttatacaatcctacgttcgcctcggtccttaccaaccgcaactcaagcaatatccggcccgggacatcggtggatgcatgcgtgcatttcgggcccagtggtttgaaaaaaaaattcatggctcgattactctccttccacggacgcggtgtattgcttatgctgcaacctcaaccgagaagtaatgacgcagcaaagcgtgctcacagtgtatgcacaacctacaacgggctattgaaacgggaaaaaggccactacaacagacggatttgcaaaacatgttgggacaaaaacctgctcgaaacaccactcagctctgatcggtttcgacaatcggagatcctgtcagaatgacgttggtgtggctctgaattctcaaaagattggtgaacgacaacaaaaccgggagcgcctgacttttattctggagatctgccttctcctagcaaaacaggaaattgcatttcggggcagcgacgaaaaggtatacgagcggtttaatttttatgtaagaaatgacatcactggactaacgtttttttacaatgcacaggatacgtcacaaaataaagtcaattttcttgagattgttcagttcatggcacagcacgcgccatcgttttctcgcgtaatgtccttagctggggaaaacgctgtgtacacatcgccacaaattcaacgtgaactgatcaaatgtgcggcagattttgttcgaaagcatattatggaggtcgagattgcagatggatatttttctgttctggtggatgaagcaagctgcgtggcgaagaaagagcacatggctatcgtaattcgttttgtgtgcgctgcaacggggactattagagaaagattttttggaactgtccatgttcgcgatacgaatgcggagacactgtacgatggtttgataacgcagttagagaagtggggattgcttttggcgaactgtagaggccagggatatgatggtgcgtccaacatgtcgggtgatattactggtcttcagcgacgtctacgctcccagtgtccttacgcctactatgttcactgtttcgcgcatcgacttaatctcgtcctagttgcagtgactatgaacacggtctcggtggtgcaatgcgtcgaaaccgtgcaagggattcacactactgtaagtgattcgtgtaaaaggaaagatcaacttattgacgaagccgctgtggaattggaaaaaatgcttgatcaaggacatctagaatctggtagaggtttaaatcaaccaacttctaccgaggggcttagcaaaacaaggtggaattgccacattcgcgcgttaagaaaagtcaagatgctttgggccccaattacaagtgtgttggagcgtgtagtggtcgatggtgtgagcccccacaaacgcgctgaggcgtcaggaattttagagaagatgtggactttcgacttcgtatttcatatggagattctcactcaagttttgggaaaaacaaatcggctgtcccaagttttgcagaaagatgacgtcgatatcgtgtcagctgtgaatatgacgaagcaggtatccaaagaactaaaagaatgctcgatgatagttctatgactgggaactcgccaagttttgaatcgatttggagctcatcggtcaacttttgctaatcaatacaagttgacgacacccctctcattcctgacaaaaatgacgtgtggaaacgacgcggaatgagaagtcgggggtgtggcagggctggaattccaggagaggactcctccagggatggtgtccagcctacacaagaagctcactatcgtaacgaagtatacaactgtatccttcgtgacctgatttctgaaatggattcacgatttagtggagaagttcttagtctcatggaattgtgcggatcgctcagcccacgtgataatttcaagaattggagcgctactaaaattgttgagctggctaaaacattttatcacgatgattgcaccgatgagctggacgaccttcgagaagaggccactcggtttcgcaatttggcaaagatcgccaaaggttccaaaaattgaagacaacgcaacaactatgcatccaactcgtcagaaccgataacaacgagctgttcccgaccttgcaccgaattattaacttggtgtgtgtgctgcctgtaacaactgctactacggagaggtctttctcagccatgaaaagaattaagacgcggctcagaacaacaatgggacatctttggatgtcaaacctgatggttttggctatccagcgtgatcttataaacagcatcgacaaagactcgttcctcgaaaagtttaaagcgatgacaaagagaagaatcgaaatgtaggttgtggattttactttaaaaaaatctatgccccctcccatttttttaaggctggctccgcctcagcggctgaggcaaatgccctccgcctctgcaagcatgatgaactcgacgatattttgatcgatctgtagctgaacggagacggcttgttcttgagctgagcactttcgtgaggctggcgcaacagcgcgatacgccccgagatgatgcggccgatggtggctttcccagggggcctttgcagaccgaactcgacttaggtccaaagggccaggtcttcatacttggcagcgggggagctctcagccttcttgatcagacgcagcttctgctgctgggtgaggcgagttctagtcttggaggaggagctcatgaggtgggtggatgggtagggcgctggtgttgtggcagattccgttgtgcttggagatcgcgctgagcgggttggagggaaggagttatcttcgcgcccgaattcaaatggtagcttcaatcactgattggctagatctgacctcactagccaatcacgtagtcgcgctcgttgcgaaaccagccaatagcgccaggatcctgtcgaaagttaacttaaatcatgttagctgtgttcttgactgacagctgtatataatgtatgtaaggatattagttgccactcagttagcgatctccttactgcatgatcaccattaacgttggccagcgattgaattcatgttgagcaggttgtgttttaatatggacgatgatatggtggataagagaatcagtaagcgttggtttgagtgatattttagtgttttttcggctactgtcaggtacttagtagttaaataagctatgtatgtgcaacggctttctgaaaaacaaaatactgtcatttacctatcctagcctacgtgaaaccctagtaccgcagcagtacgtccgacaatcaacacctctagctctgtgaatacttggtcgtttcgcttgtggctaaaaggagagactatgttgttccttcgtcctattttttcaaattgcacttaaaaatgtcagaactgaagtacttctaaaatgcactaccagccgaaatttctagtgaattcaagaacggccactattcgtataaatccgttaattggggcatagcctcccttataatgaaatagacttttcacccattttacaggtactttttactccaatttatgaacctctgtattacaattaagaatggggtagggcaaatgaactatcatagcctgcccgggggcgatttcgattgaattttacctctttttaagaacacacgaactcatgttgaacggcgcccaaacgcgacccttcaaatgttaccttgttcgaaggtataacaagttattaaactgaggtcaactttttatcgaaccggatatcgccccgtttgtatcatcaaacaaacgattgcgttaatcgttgaagtttaaggtaagagttgacgaccgacgatttatgcacatggaccatggaacccttttcaaggggtggctgaactccggttaaatgtggaaacggaggcaaatgacagtggaccccgccgtaaaaaaacatatgagagatcaggcagctccgtaaaaagtctccgctaacgtacgaaacaatatactgaagagtcgtttgggttaagttattcatagataacctaattcaaggtatcggtcagtacactgatagatccttggcaaaactggcatggagcagtgaagtctaaatccaaagactatactatgctaccgctaactattacgaaccactcatgcggaagcaagaaggcagcactagaagtagttggcatattagttgctgcaatcgttgactgaagaaatctataaatcgcttgctacacacagttctgcagcagcgggggcaaccgattacgaagatggcatgatacagaaatcggtgactaggccagacgtgacatatagtggagacaatagccaggatgtatgctctgtagctgtgaagaaagcgtggataattctctttttgccctgacatttggtatattattctgacaaccttgataaatagacgaagtattgtcatttgcgcaggaagtaagacgtcgttgctctcaacaatggcatgctatttcctgagcaagttaaagtagcaatgtgcaattctgacaccaacttttggtcttgcgtgttcacagaaacgccaaatgtatagctaacactagcgtttgttaaatgtttgttactgtatagtgaatctggcgaacatgtatgtggagtgagacgtgtagtcgttcatcttgaagctcttttaaatcacttacagtgagttcgtgttattgtgaaaagcacttacgtgttggggggcacactgctggtctcgctgtttcaattaatgtaatataagagcaaatgtgcataccggtggttgttgaatgtaatgtgactgaatgtttcgccatcagttacaactttactgatatattggcttgctgaatgctcgagcacgatttagcctggtactgtgggggatatttaacgatgtccacccggaaatttgttgcaatcgattcagcggccaactgtggcaacgccaaagccatttataatgattcggaaagtgtttatttactactgtagcatggaaaccaggaataagcaaaatactatacattgatttacggttgaaagaggtcgaaagctacgacggcactaccagatgcggcacgagatcccttgctgttacgtcaagcctctttcctgtcttcatttatggcggcgacggatgactcggacatgcaagttctagttgatcagcatgtgtgcaacgtcgggaacacgcgcgctgttcaccagtgctcgctgcgcttgctcgtggcatcggtccccgtgctgcctataccgttttccatattaaactccaagcccggtcattttaataaaatctgatgcaaacccggcacttcgtgcatatatttttgaaaccaatttggtaaaagtatgagtgtgtataggatacttgggggcggtgctaagaagctaagatacaacattttccgaagcaacgcccctctagcaaccggggcgggatcccgtcggcatgttgttggagcgagaaaaaaatccgatggatgtcgcttgagtggcagataatctatctatcacatgtatatatgcttgattaaagggtatgcaaaataataggtaatttgacttaatctcaaccggatgggtcaacatagctgcataatttgattaaatcacaggctatccagtataacaggtattttagctataaacatcagcagcgctcaaacccatacttagcaggtatttgatgtgagaataatggcacctcagtggccttcacccatggactctggataaatccagggaacaagtttgttaacatgcctactcgatacagcttactgggcctaacgtgtccataccctgcaaaaacagcgcagtcatgagataacatttttgtcgaaatttagagactcaagtcagatggtggttagcatggcgaacatatattgaaatcaagtcaataaaagagtcggaagagctgcagcacagattatattgcgtttcatcgtacatgtacgcgcttgcgttgctacggagagacggtgaacaacaccttaaaactggagggagagaatcgaataccatagttttgggaacggatcaccagagatttggacaccaccaccagagaattggccgccgccaccaatgatcaatgagggatcaaatcaccagagatatcgcactccaccaccaaagaaaaggtgttctatcaccacagaaaaggattacaccaccacggtggtgacaccctggtggtgtccaccctattatagtgatggtcagcacgagtagcgagttcaggccgccttgcgtttgctgattctttggctatcgcagtccagcctgcacgcgatgtgctcttcgccagcaatgcctagtagctccaagcgctccgacgagatggtgctcgtcgacaagcatcgggaagatgcggctgctggagaggcacaacaatgcctacagaggccacaaggacatacaggccggtacgtagtgatctatcactcgcactcataacgacatgctagccaggtatagcgcattaaaatgtagcgtttgttgtaaatgcaattttcaattagatgcaccgcgttctttgaagctcggtgaggtgtatggctgtagtgcgagaccaacatatgaaccgccaatggcaaaagctttaagaaatgtataaatgatgactggtgggcgcctttatcaaatgcactagcatctacggcgtttagtctgctcgcatgactgccgactacgacttatcgacccaaacgattctgtgctggcgatctcggcgttgattgttgccacttgaagtggggctcttgcgctgcttgcacgggtcattggggctgcgccgtagtttgaggcgacatttatggtgtgtagcaccgaatcgctatagctccgctggtatccattcgccccttgatatgcagtgcgtatctctgaaagtgactcgctccgcatttcacgctatcttaaaagcattgcctcgtacgacccgatctccgcttcaattggggtcaggcggaataactccatgccggcaggcggttgtgctctcgaggtcttcacgaataccactctcggtatcgatgtgatgctcgatgaatacgggaggcggcgatctaggttgcaggccaagtactggaagctcatgaaacgtacctaagtgatggctggtgtcatcacttggcggacgggcttggggtccttgctcggggtagtgagcggcaggatctccattcgtatcagcaggacaaactcgaccatcactgctttcttggtgagaattgacgtctacttgacgcccagatcctggtcgtcgggaactctgcgtggtagtaccagtttgacgtcgattacttacgaagaccggtactggtgcaggcattccggggcaatgcaacgacagttctcttgtagcatgtatcacgtgagtacagatgccgaatttcatgttgctagcaccaaaaacttgtgtcagcaccataaaattcgtgagcagcaccatactgcacagcactgcaccagtaccaagcgggggggggggtgcgctgttgatatcacctccccacaaaaagctcattgtttcatcgcagaccgagctgctctcgatggtatcatgctcgacagccacagctcaaactgtatgatctatcagactcaggctagaaagctgagcgataatttcactagctataacgtctactttcttcactaaaggctgtgacatacatgtagtcatcgcctgcttccagggcctgtaagtgcaacatcaaagccgaaagtggtatgccctccccacgcagttcattcatccataccacgagctcctgctcagcttcagcggggagggccatacctgtgccgctcgtccgagcattctttttgagagctgtctgtccatgagctttcgccgcggttcgtggagaaactcatctagaccgctgtagaaggcgttaacagccgcggtgatgtcaccgcactgtgcccagacatcgagcacctcgatctttctgctgccgtaattgcggtgcgtctgcgagcaggtagcatctagtggattgggaaatgacccatttttgtgttgtcagttcaaagtggaggatggcaataaggtattttgaatggctataatgattgtcagtaataagcgaacgtcagtaaagaatggaggatgccggtacatgttgcggcagtaataaattgcaacccctctgaagtcgagctaaccacctctgtgccgctacagtacgagcgtcgacatttctggccggtgcatacgcactgcagtgattatttcaagcaaattcatccgaggaaatatggtacatgtagctgaacggcaagattcaagagaggccttcgccattggcaatgcttcgtagcggataaacgctagcctttgcaccttataaaaggtttttgagcaaggtgcaatcgaggatttttctgaaaccggcctagaacagctcagcatggccacaacagtctgcgcttagattttgtactcagaatcagattcagaaacgtactcagtcttatccggtgcattgcctccactcaactccagccctcgaaacactcgtggagatggagtcgcggccgcggttaccgtggcgagagctcggtattgatctcgtagaacacgaagctgctatcgctctagagagaccccgagcttacgatacgacgaagagccatgagacgccgtgaacactgtgcggaaggagccaagaccacaaaatgcggtacaaaaggctggtttgtgcttcgtcgcaatgcaaggaggttgtgccttcgacttgtccctgggaaggcaaggtcctcacttgtcttttgacgcgacgcacctaccttttcgaagtcggcgaacattacacggacattggatcaccgcgaaaaaagaaactttccgagcgccaaaaacaattttgccgagagctcgcagctgagcgcctacgcccccagcggattaggaatgtcatggctcgcaaggttgaagctccgctgtcttccctcccgtcgctacaaactattcaaaactttgtgaactattacgcgaggaccaagctggaaaatcatgatcatctcaaggagctgcaattgtggattcatgcacgcgcattttgtggcacagaggccaagtgtgagcctttcactttctcgtgggagcacgatcgtgctggcaagccggtagttggaactggcgcggatacgaagccttttttggtgggaattacgacgaaagtactgatccgacgtctgactgaacctagcgcgaactacatcttacatttggatgccacgttcaagatgaccgccaaagacttccccgttctggtggttggaatttcagaccgcaaccacagtctccatttggtggcattgttcgccatttcgcaaaggctacagtggatctacgaaggcacgctctccgctatcaagcatctatttcaatgggtcactgggcaacatttggagcttctgcgggttatgggggatgccgaagacgcgcaatataacgcagtttggtcgggttttgggaactcgccgcgtttgcagtttttgatgtttttttccacgtcttgctcaacgtgaataaaaagatgaaagcgtttccctcgtataccaaggctgcgctgctagaagacgtgcgctgcttcggaaagcgagtttgtagttgcgcgggacttgattttacgcaactggaaaaaatacgctggtctggtcgagttcgcttcccacatgaaatcccagtggctgtttggaaactttagcgtgtggtaggtatacgtcagccccagtggttatgcgaccaccaccagcccggttgaacagttcaaccggattttgaaacgtgactacactctaaatcggcgtcttaaaatggggatgctgctgcgtgagctcagcaactaaaacgatgctgctttcagccaataggaatcctaaatgtgtatggaccacccgtcgtggtggtcgtaaatgtatgtagccattggtgtaccttacaccaaggtcgaggaagtgttcaaacctctaacagacaccgcatctgttagagtaacaagtgactgtagccacttgtgcgtgtaaccccgttacaccatccccccgtcaaggttagacgtgccggtctcgccacgacaaccaccattgaccgtttggtcaatgcgtgctgtttgaagagagcgtgctcgttccgtaacgagcacgtcgaagttgaagacccctggcgcagcagcggagaacatctctgctgctgagtagcatgcgcggcaacgtgcgaagcgtcgctgccgcgggggcaggtacctacgtctgcccacgaagtgtcttcgggcgctgcttttaacagcagcgctcgcattacgtagcgcatggtgggcttcgtatgccctcaccatgtccgggacgtcttcgagcaagacgttctgcggctcccatgtatcttggttgggagggaatcctttccaacggatacgaaaacgaaccggttgcctgttcgttctcgggatactgtgaccaacaatccgctcaactgtccatcgagttgagccgtgtgcgccacgaatcggcggtggtggtggtggaaacacgccccgtgtttggtcaacttggtgttgaccctgatctcgcgtctcctcacggccgagttccggtcgtggagtagttccagagcgctgggttcggcgctctgaagtatcctcaggttgcggcggcctcccagaccgcctcgatcgttccggccgagctggaccattagcccgacccgctgctccagcgcgacttcgcgctggagaggatgacggcttccgccgagtcttctgcttcggttcagccgagctaggtagctcgtgctgcaggtatgggttcagccgttcgaagtagaacgtcggatggaggcgcatactagacggtatgtccattgtgtaggcgttgccgtgccgtgccagcacagtgaacggcccgatgaagggcggagcaagcttgcttgccccgaagtctgaaacggcatgtttaggcaagttttgagtagctaacaagactaatgaacccttcttgaattcatttgtgttgcccctgccaacgttgtctgcgttcagcttctgtcgaccgacagaagctgcaatagcgtcttggacaaaccgaatgacggcttgtctgcgctgcacgaagttgattgcgtccgagcagaactcgttcagctcgcttccaggagtaggccctgcctctgcgttagtctttgtggtgtctgtgccctgcacagacacgctcttcttcttgttgttcttgttggtgtctgtgccccgcacagacacgttcttcgtgcgcttgtcggcgtctgtgccctgcacagacgcgcggttcttggcgttacttcgtgtcgttgcggctgacactgtgcaagtgccagcggcattctgcggctgctgcgttgcagtcgtagatcctcccccacttaaggaaggagccatcattccgagtagactcgggaggcgtgggtgcctgatggcattcacgtagaacggtgtatgcccggtcgaggcatgcaccgagttgttgatggcgaaatctgccatcggcagacactcgctccagtgttggaacgagtgagcgtagctcttacgcacgtctacgagcacgcggttcacgcgctcggtctgcccgtccgtctgcggatggtccgcagtcgacatcgaaagttgactcccaagaagtgtaaacacttcttgccaaaagtgtgcagtgaagcgcgggtctcgatccgacacaatgtcgatcggcatgtcatggtgtttgaacaccatgtcaacgaagagacgcgccgtctgtttcgcagtcacttcagcgggtaccgcagcaagatgtaccatcttgctgaagcggtcaacaaagaccacaacgcccgtgttcccctggctgtccgggggaagaccgaacacgaagtccaaagacatggactgccatcactccgacggagtcggcagtgactgcaagggggcctgcgcaaaaggcgcaggcttcacacgttggcaaacctcgcaagcgcggacgtacttgcgcacccatttatactggtgggcccagtagaagtcccgcgtgagaagaaggtatgtcttctcacggcccggatgccccgcagttggcgcatcgtgatattcatatatgatcctgagtcgcaggtcgtggtcattgggcacgacaacgcggaccgcgttgtcgtcgactgcactgtagagtaataacccgtcgtgcacccgataacgatgtgcacgagcacgaagatgcttcggcagcttctgaagagctctgacagaaggcgctgagccataggccagcaagagcttcgcgtccgcgtcgtgcgcgtacgcgaccttcacgttgtccaacagtgacaacgttggggtactcgatcgcatggcgtcaatagcattgacgtcggcattagtcgtggcgtagtcaggtcgacgcgagagcgcgtcggccaccacattgagtcttccgggtttgtactcaacccggaagttatactctgcgaagaatgagagccatctcgccatccgttgcgagatgtgcggcgacttcacagccgtccgcagcgacgcgtggtccgtatagaccacgaacggtttgcttccgagtagatacactcggaacttcgcgagtgcgtacttcatggcaaggagttccttgtcatgatgcaccgggtagttgcgctcagctagcttcggctgacgcgattggtagtagccacacgatcacgaccctcatgatcgtgctgcatcaacgcacatccgattgcgaagtcggatgcgtcgcacacaacgtggaacgggcgatcttggtcggacaccgccaagatcggcgcctcagtcaagccctgcttgactgcatcgaaggcctactgacactcagcagtccaaatccactcggcgtccttcttcaggagctgtgacagcgggcgtatcatgtccgcgtagtccttcacgtacttgcacaagtacgtggccaagccaaggaactgccgcagttccttgacgttcgacggcgtcggccactcattgatcactctgaccttctcagggtcagggcggacaccgttcttcccaacgagacacccgagcacgggtatctcgctcgccccgaagatgcacttcttcaggttcgcatagagcttgtgtttgcgcatgagcgcaagcagcttccggagatgcacctagtgcatctcaacatcgctcatcctgtccgcaggccggctgtggacgaacacatcgtcgaagtagctcggtgcgaagtcgcgcaccgagcgcaacaagtgcgtcacgcacctgttgaaggtcgcaggggcgttcttccgaccctgtgacatcactagccactcccagagcatgccgctcggcgtgctcacagccgtgagagggatatcgctctcacgcatgaggatctgatagaatccatcgcgcagatcatgagcactgtagatagtgctcctggccatcgaatcgatgattacatcttttcgcggtatcggcgtctgcgccggaatcgtcgcatcgtttagcttgttgtacgcatgaaagatgtgccagccgccctgtggcttcttgacacagaacgtcggagcactgtgcggggatttcgattcccgcacttgtccagctttgcgacgactttcgaagaagtcgtcgatcgccttgacctgctctcgcggcagtggccactgccgcgtgacacagtactcgtccccggcacgagatcaatctcgtaccggatgcccttgtcctgcggaagctccgcagggatctcttctggaagcacgtccgcgtgctcccgtagaatctcgtagaaggggctggtcttcagcgagtcccagctctgctcctcaaagcactccctcttagtcttcgcactgagagtgtcctctcagtgctgctctccatgaagaactgcctcagttcttcattcttgctcttcgttctctcggcgtccatcgtgcaagtaacgcgcgaagcgcttccagctaatgactggacgctaagtcaactccgacgcttgcgtcggagggttagcgagagtcatctccctgtaccggaacctggcacaggtacgcgtcaagacgttcagcgtctcgacgtccgccttctcagcctccgtctgcccggcagacatttcttgtagcgtctcggccccgggccgagacttgcgcagcgaccttcgcatgcgccgtcttcttgttttgcggagcccggctccgcttggttcttgacctcgtccaggcccagccgtggacgggtgttcttcttcagtaccgccggcgggctcattccgcgggcgagcgacttcaagcccggcttggtcgcccggcgcttcgtcgtgcagcccggctgcacgacagcatgcaagtttttccggtacgggacgtttgcaaccgtcggcaccgcttgcagcgtcgactcccggagtcgacacgccatccttacctcgacgcctgttattggcggagccctccgttacagctaccgtcttctccgtgctctccagctcgtctctctccaagctggcagattctcgagtgtccgggcctctcggccgcccgttccgcgctctgccaccgtccttcaatgtcgagtcgacgctggccctggattcaggccatgcgtgctgccgtccgtagggtgcgtcggctccccgagccgacaaatcaaattcgttccagctatcgaatcccggagtcgatgcgacttcaatacctcgacgccaaccattggcggagaccccattacggagggtgcgtcgtctcccagagctgacgaatcaaattcgtccaagctatcgactcccggagtcgacggcgtttcgtcaccttggctcttattgttggccaaaactgatccaatccaattcgcgtcagcctccacggctgaagcgtgtgacttgcctgcgtcatccgtgccccttgaggtcggagactcttcctgattcgctgaaaagcgggtgtcgacctctgaggtcaacacattttctccttcagccgtcggcggcgacgccgacgcttgctgctcttgcgcgtgtgctcgcacgcgcccagggcactccgggacagcggcattaggcgctgtctcgagtggggagttgcgagcacctgtccgtgcgtgcgtagcggcaacagggccatcgctcactgttctgctgtcgcgaccgaagcgcacgagagtgcgcttctcccaatcgatgaccggatcatgccgtgcaagccacggcatgcccaatacaatgtcaaacttatcgttcagatccaggacgataaaggtctcgacaaactcttgatcttcatacgtgaagcgcacgcgtgtggtgtagtaccccgcagaagaagtgggcgcaccgggcgccggaggaagaaggcaccaggacacgagtgatggacctcgacgcggctgatggaatgcgacgcggatggatgggcgcgacgcagggccgagatcgacgggaaagtcggcgtgggtgatgggccgtgagacacggtgccagaatccagtgcgtcgcgtaatcatccgacgggtcgaccagcgcgcccggttctgcaaaacgcgccgaccctaaaccccgccgagcaaaacgcgccgagcaaaacgcgccctaacccccgccgaccaaaacacgctgaggaaagatcttgattgcgccacgtaaatcaggttgaagcacggtagtgcaagcacgacagaatttaggataggcacagaacggtaggcttagcaagcggtagtacagagtagccagtagcaaggacataggatagggtaaggactcagtcccgaaatttctctgaaccacaaagacctcccgtcttctccgaggttccaggggaaccaccaagcaccggcaagtagagccgcctcgatatcgcggccccccgtcgtttgctggttcgggtgctcacccccccccccccacagacccgtgctggaacaaaggcacgttcaacgtataccgtttagatgggcgcccgataacgcgctgcctaggcgaaggaccgcactggcctgataaccgccgtgcacaagacccccgtgtacgcccgataacgccatacaacccccaggaaacgccggcccgataacgccgcacgcccgacgggaacgccgaggaaacgccggcccgataacgccgcacgcccaaggctcgacgccctacgacaaggaacaagcgtcaacacaagaacccctaactccgaagcctgggaagacttgggcctgtatttcgaagatacgctactccaacaaccgggaataatttgctcggcgcgaccgctatccagacgcgccgagtttgtgcgagatcgcattcgcgagatttctgcgagggcgctacttcacaatggtgccgcgaccggcgagtactacttcgaatgacggactaacgatccaagaggcatcggaggcaggtgcgcagtcggctggaaggtcgccgaccgcaagagaacacagtgagagacctgtcgcgtcatggagctctgagggaaccttcacgacaggccacggggccagcgacgaccaggaggactacgaagaacagtttgccgttcccgatgcggctcccgacgagggagccgcgaagggccgcgacgcaagtcgcggtcctaccggtcggaagcctgcaaaggccgacgaccaacaacaacccaccgccaaggcagccacgaagcgcaagccgcccaagaggaagaaaaagaagctgcgcgcgccgaagtcggcggaggggtcgctgcccaagccgcaaggccacgggacgtcagtacaccggcgaggaggtactgtacgttgtggcgcgcacggagctcttccgtctgctagaacaagacccaatcttggtcttcctcaagcccatgctgatgagcaacttcacaggccccttcgtggcaccggacttcgatagtctcaccagcgttgcccacgccgcgccgactctcttccagatggtgcgtgactcggggttcgtgctgggggctttcgagatggagaggctgtgcgattgggacttcaaatcttggttacgtgcgattcgcgtcgtgcaggagcccttgacgactctcgccggatccatcaaacaagccgcgatgagttctgcgacgggccaagacgcgccgagcccctcggcgggtccagcccagacttcgacgaccacgccctcacctccacctcgataccaatcaagcgtggactccgacagcagtttcgagtcgcccaagcgcatgcccatgaaccggccgccgcgcgtcatgcagctatccgcggcgcccacacgcacagaggtgacgaaacccgccgaggaggtgcttcccaaggccttgagagaatctatcatcaagctgatgcagatgacagtgatgaacaccccgcgggccaacacggccgcaattccgacggggccgaaggctcccgcgaatctcacacccacggtggctcgcccccaggaggcagcggatgtcgccatggagtcggtcagttcgcgttcttcgacgaggtccaggactcgacgcgacgcggacgaggaccccgatgacctgttcgacttggacatcggagtgccaagaaccacggccgccgtctcaacggcaacagccggcggcgtagtcctcgctcgcgtacgcctctcagcatcttccgagctgaaagagttctcgggacgggacgccagcgaagagaaagccagactgtggctcaaccgtctgaagtccgccgcgcggcgcgacgggatgacgggcgaagaagtgtgcaggcagttcagcgatctaatgagcggccctgcgcgccaatggtatctccagttgcccaggaaggtcaagcaatcatggaccgagctgatggagcaattcggggtgcagtactgcggcaagggcgtgtcaatggccagtcgctactaccatgcggctcagcgccccgacgagacccctctggattacttgtaccggctcaacgtcgcgggcttgagggccaacatcccatacgccgagggtacgactgaagagaagcgcgaacacgtcgagcatttcatccggacgctgaacacgcaggaggccgaactcacctcgcctcttacgctggtggaggtcgccgactccgaggcgctggagaagaagctgcgtgctcgacaacggggactggcccaccagaaaatgactctctcggctcgaacaagttccgtcaaaaggcgctgaccccaccgattcagccggcgcgcgccgtgcatgcgattcacgtcgcgtcggacgagtacgattcgggacgcgaaagtcgcgacagcgacgatcgccagtacgaccaagacgaggcggacgaagaacgcgccaagttgttcgtcgcgggatgggccccgccgggagagccggcgcgttccaacttcgatcccgacgactcgggacgcgcccggccgccgagaagatgttaaactaggacgctcgctggcttggaaaccagtacgagacgagcgacctgtttccgtctatgcatatgtgaccaagaagtcgcgagaggtggtttggtagagcccgacttccctgaatgataatacatgtgaatccaacctggaacgtaccacgcaagaacgcgcgccgcgaatcgcggcggtccgacggacgacggacgacgagtttgcacgtgaaccacccctggacgagatcgacttgccaccaggagagcgacgcgggtactggaaacattacgcgccgcacaagtggtacaagcaggccaagattcatggaaagcagaacaaccgccgtgctgtgttattgctcgacacaggtgccgaggagtccatcctggacaccacctttgctcgtgaggtaggctgcctgattgacacggagatcacgcaagagtgtgtgggaattcgtgatgagacatattacacggtggggagaaccagagtcaagattaccttggctgggaacttagtgtactacatgcacctgtgggtcggccaacacgcaatcctgggaatgaacttcatggtgcccgctggagtgcgcatcgacagtggacagcacggcgtgcttccccgacgaggtgcatatccagatgatcgggcgaagaccgctatacggcgcacggatgcactcggttaacgtcaagacgcctgtgaggctcgaaccaggagacacgcatgaagtcttgctaaggccggatcgaaacgcgccgttcctgtgggtgacacgggcagagtcgtgggtgactacctttgtcaaggggagagtcggaaagaaaacgtacctgcgtgtcatgaacatcggagacgcagcgataaccctcgacgcgcatgaaacgcttgggtggtggacgccgtctggtggccagcctcggaaccgtggattcgtccgactgggctccacccggtaccagcagtggcagaatctggcgtacggcgcgacgcgcgacgcgtaggagaactggatcccagccgagctcgacggaccgatgacggatcgcccctcatacccgaagcctaaagccatcttgcgcccggagccgagacaactcgggacgcgacgcgccttgaccccagtgttggcggctgtcgcggaagcgccgaagggaaggggggtagacttgccactcgacgatcacaagccggatacggacgaggaggcggtggaaagcgaacccgatatgcctccgactgtggctagaagcgctgcaatggaagaattgccggagtcggaactcgctgagccaaaactcgacggaccaaaccccgccgagccgaatttcgacgaggcgaaacctgatgagcaggaggaagacgacgcggtcctcatccacgaggggtccgacctcttcgtagaggttctcgagtcggagatggcagtgctgccagacctctcgctgaccgccgaggtgaagatcgaggacttgaaggtcggcatgccgactggccaaaggcttgcgcctcagtacgaagagggcgaaggcgggatgctctactaccagccgagaagcgacgattccgccgaggatcgcgatgtgatgatgaagctggtgatcccggagactcttcgggaagatgtactcgaccacaatcacgcgagcctggaaggcggacaccagggaattggccgcaggtaccaacgcctgaggcgccccttccattggccagggatcttcagaagcgtccagcgctacgtcggcgaatgtaccgactgcgagacaggaaagggtcggccgaccatccagggcgagtcgccgggcaacatcgtcgcgacgtacccgttccaggtcattgccatggaccatattccgtcgttgccggcatcctacaaaggcaacacagagctgttagtctgggtcgacctcttcacggggttcgtcgtggtcaaagcgaatgcgtcacgaaccgcgcagacggtggccgaggcgtacgaggaggcggtgttcaggcgcttcggcgcgagcgaggctatccgccacgaccgcgagccgggcttcatgtccgacttcttcaaggcgttcagcaaactcatgggtcagagacagcgagcgacgcttgcttatcgtccccaagccaacggtgctgcagaacggacagtgcagacggttacaagagcgatcaagatgtacatcgcagacgtcgaccaacgcgactgggacgaatacgccgagcgtcttaccttcgcgctaaacacgtcgcacgaccggacgagaaatgaaaccccgttcttcttagtgcacggctgggagcctcggtcgacgctggaagcgacgctggccgcgacatgagatcgcgacgggctcgcaagtttggttgtacctggatcgggtgaagccggggtatgcgcgcaaactcgcgcacatgtggcacggacccttccgcgtcgccgagctggtcaacgcattcgcagtgcgcctcgagacgacgggtacgccctatcagctttaccccgtcgtccacatctccaagatgaagcccgtccgggaattcccgtcgcgacccacgacgcagctgacggtgccgaccgaggagcgcttcgacttcgacgaggagctcttgccggaggacagctgggaagtcacgcgcgagctagaggacgacgtcttcgaggtcgagaagatcgtgaacgtgcgcgaggggcgggctacccggtatgggcgcacgcgacgcgagttcgaagtcaaatggaagggctaccgggacacgacgtgggtcgacgagctcgatctgaattgcggcgggttgctgtacgacttcctgcgccagcgcacgggacgcaaccggttcgaggcgatgcagtcgaacgagaacgcggaggcggcggagcctggtgggtgaacgcccacgggtgcgactaagtcggcaggggtgctgccgacgagaggactggtgggaagcctcaactctgggaatggccggagcgagggattggatgagggaagtgaggaggaccagcctgttgctgaagatgcgtcggcggagggccgtctcataaaagatgtggagaagtggaaagaaacaagggaaaagatcaaggctacgtgttgaagttacggctacaacaactaaacgcgacggactgcaacgatgggccaagactcaaacctgctggacaaacttacctgcaagacgcggcacatggaaggctgggtgatcgcgcgtcactcggcagcgtacgttggcgtccatctcggccacagtgagcggcgttcgatagaaccggcgccagggctcctgcgcgtcgatgtcgccgagcgctgcttgcaacgtcgcgtgctggaggactggataccaccgtccgatcgacgtgtgcgcgggcggaaagtgaagcaccattgggtccagcaagaggtccatgtctgcgagcccttgctggaacagcccgaccaccagctgcaacaggctgttgaggtggttgcccgcgtgtgagcgacgcgagttgcgcgccgtgcgccaccttttccacgccgcgccctgcacgaacagctcatgggtggcctcccagtacgcctgagcccagtgctcgatgtggtgccggagccgacgtagcaatgggcggaacgccgcgtcgccggacgcgaagggaagcgcctcagcggcttgagcgaggtagcgccacgaccgagtcacgtatagcgcgtcgacgttggccagagtcatgagggcgcggttccagtttgcaggcgcggggggaacacggcgcggaatgatccagccgggcggcagcaggaagagcgttcgcaactcctgcacggtgatgagatgaaggcggagacgtcgtacccgcttggaccaaggagcgtagcgaggctgccgccagccagacggagctccggcaggcggaatcacagggtcgaagaagggcgccgccggagcactccccgccgagccgctggaggcggtgctcgaggacgaggcgcgggacgacgaggaagcggacgaatcgttgccactggagtcgcccgaatcgcccggaccagtgcctggtccagctccggctgccgcacggcccctcgacaaggagtgcgtcggccgtgcaggagaagagtgacgcgaggccgccgaccccgtcgagtgcgccgaccccgccgcgtgcgccgaacgcgttgagccggccgaacgcgtcgacgccaaggagggcgagcgagaacgcgagcgcgagcgtggaggcgagtgcgaacgtgaacgagaggccgagcgggaacgcgaacgcgaagcagaacgggagcgcgggggtgtccgggaacgtgactgcgaacgtggaggcggacgcgccggcgaccgtgagcgagacccggggctatgcagccggcggcgcttggactgagctcgccgcgcttggtcctcgctgtccgaagactcggagccgaagagcgacgcgtcctctcgtgcgcacgctgcagcggccgtagagggcgtagctgcagatgaggcctgcgcagcggtgttgtcggaggccgcagtgtcgaccacggtagagagccgtcgactacgtcgaaggggcgaagaaccagacgacgtagcggacgccactcctgacggcctagacgcgcgtgactgagaacccgaacgactcgacgcgccgtgtcgaggtcgccgaaaacccgacgaggacgaggcagcggacgaagtcggaacaggacgggagcgtgaaggacctgttggaggggaagcgccagtcgtcgagcccgccgtcgaagccgaccagcccgcccgggcaccagagctcgacgcagttggagcaggaacaggaaccgcggatgccacaggaactgctgcggacgtaggaatagcaggagggagggggatcgcaccgtcgatctccgccgtgaaagtggcttcgagtcacctgaccaggtcagcgctgtcgatctgcccgcctacacgcgttacgacgccggcgagacgatcagcaagctcgtcgcacacccgccgcgccagctctcggccccgacgcgcgtctcgaagcatccgacgccaagccacagcgcgttcgtcgcgctctcggatggccaagtcgcgctcctcctccagttcggcgacgcgagcgctgagacgatgggtctgggcgccgactcctcctcgacgctgctgagacgaccgccgcatggacagccacccagctcgatactgcgccgcgcgagatgtggcgcaaagttcgacggcttgagcccgcgacatctcggactcggcggccacacggagagtcgtagcagtagccactgactcctccagctcgtggatacgcgtcgcgccgcggcggagctcctcggcgtgggccactaagagcgcgttaacgcgccgaaggtcgtcctgcagcgggacgttcaggttctgggccgcctcgatattcatgcggctctgagaaagcgacgcacgggccgcgcggagctcttcgtcgacaggggcgccctgctgctccagagcggtcaaggcctgacgagcctgatctctctcggcgacggcagcgtctcgtcgctgctcaagggcggccacggcttgacgtgcccggtccctctcggtgacagcagcgtcttgctcgcgtctcacggccgtggaggctcgacgcacttgatctcgtatgtcgagggccccgtcacgctcttgctcgacgaccatgagaacgcgggtcacgcggtcacgctcggcgagagcggcgtcgcgctgctgctcggcagtggctacgagctgccgcatgtgatctcgttcagcttcggcggcggccacgcgcgcttgggcaggagcgaaggcagtttaggcggctgcggggtcgacgcgaaggtcgtcacgctcggcgcgcgcgtcgtcgcgctcgccttgtgcagcaaacagcggggctagcggcacggtggatggaggcggtgtagcaggagcgcgcgcgagttgggcggtcaagtcagtgacctggtcttgtgccgcccggagctgagcttgaagattacgatattgctctgtcgaggggcctcgctcggcgcggagtagagcctcggcagcgtcggcgcgctcagcacgagcacggaattcggccactcggtcctccaggacggcgtagtccctctcggcgtgctcccgggagaggagcgcctgctcgagccggatcatgcctgcgcgataaccctcccgagcacgatgcaagatcgcgagattgcagtcatgcagcacggacgcgtgagtagccaagcccgcattgtgcgctgagacgagttcgtactgggcgcgcagctcctggttctcgagctggagagtgcgcgcgtcggtgacaagagcagtcaccgagtggacgggggcgcctgaagccggaagctggacttggggcgcgacgggaaggtgaagacgatgcgcgccgagggcgcaaaccgcgcagccagcggcctcgaggtcgtcggtatcgagctcttcctcctcgaggtcgatgtcgttggcgtcgacgtcgtggcggcgagccatgaagcttggagtaccgcgaagcagactgcgagggcagaagacgcgatggtgtcgagacgaagcgaaggcgcggggcaggtgctgcgacgacacacccacctggggagtgcgcgtgcgtggcagcgggacgaatgtggtgtagtaccccgcagaagaagtgggcgcaccgggcgccggaggaagaaggcgccgggacgagagtgatggacctcgacgcggctgatggaacacgacgcggatggatgggcgcgacgcagggccgagatcgacgggaaagtcggcgtgggtgatgggccgtgagacacggtgccagaatccagtgcgtcgcgtaatcatccgacgggtcgaccagcgcgcccggttctgcaaaacgcgccgaccctaaaccccgccgagcaaaacgcgccgagcaaaacgcgccctaacccccgccgaccaaaacacgctgaggaaagatcttgattgcgccacgtaaatcaggttgaagcacggtagtgcaagcacgacagaatttaggataggcacagaacggtaggcttagcaagcggtagtacagagtagccagtagcaaggacataggatagggtaaggactcagtcccgaaatttctctgaaccacaaagacctcccgtcttctccgaggttccaggggaaccaccaagcaccggcaagtagagccgcctcgatatcgcggccccccgtcgtttgctggttcgggtgctcaccccccccccccccccacagacccgtgctggaacaaaggcacgttcaacgtataccgtttagatgggcgcccgataacgcgctgcctaggcgaaggaccgcactggcctgataaccgccgtgcacaagacccccgtgtacgcccgataacgcccgacgggaacgccgaggaaacgccggcccgataacgccgcacgcccaaggctcgacgccctacgacaaggaacaagcgtcaacacaagaacccctaactccgaagcctgggaagacttgggcctgtatttcgaagatacgctactccaacaaccgggaataatttgctcggcgcgaccgctatccagacgcgccgagtttgtgcgagatcgcattcgcgagatttctgtgagggcgctactccatacgcgtactatgcgcttctcggttttaacgatggcacccgttgccaatcgaacttccaacatacttcgaggtataattacctccacgaagtcaagccttgatagacttcgcagtcgaacaaagttgttcgacgcgcccgaatcaaccgaagagagttgctctctctcttcgaagacccgttcaagatgacaatgttcggtttgtctttatgcattttgcagtgagaagggtcctcactgggggctgcagtcctcagtgtcgcatgtccgagttggacacgcgtgactgcttcaccagtagggcgccccgcgcctactgggttccagcgttttttgtttgtccgcgacgatgcccggcatcgccgcgtcgaccaccatctgggtgcacgggtgccgtgcactctcgggcattgtgacccatccttccgcaacggaagcatcgtacattacttcctcgttgctgttgataaccaacagctgttgcatccgagaggtccattggttccgaacctcccgctatcgcgaccggaggcggttccagcctcagcgcattcgcatgcagtttagcctgcctcagactaaactcctcctgcattgcaagagtaatcgcagcttcgagagtacctgggtactcacggaagagataggtctttacaggcccatctctcagacccttcatgaacgtgacgatcttggtcgcctcgtctatcgggttggtcacaatgttcgagaccaagtaccgtgctctctgcgcgtaagcatggacatcatgcttaccctgctgtaggtcgagaaactctgccctcgaccggaactcgttttgctggggctcaaattcttgtctgagctcctccatgaaaccctcgtacgtgctgaagcacgtaggatcagagagtcggcgtccatacgcccaacttctcgctcgtcgccaagacatgacatggcgaatgtaaccttggacaacgggtcgacgatacgtcgagccgcaatggcaatgtcgagttcgacaagccaccggatgagagattcgccccctcttccgacatagttgctcacgtttagcttcaacgattgctcgtgcggtgtcgtccccgacgccaccgtgatagaggaagcagcatcacgctgctccttcatgatgaatcccagagcaacaccgtgttgctccgtcggcgctagtgtgcgtagcattgcagctacagccgcttctccaatgactgttggcagtctttggagtgcctcccactctggatccgacaggtggaggcagtcagcgcgtgcaacatgagttgcaggcgaagtggagctttccatggtcacctccgcgctcatgaaaaggttctcggctcctcgttcgtacagctccgtacgaacgttcaggtagtcggtcgttggacggactactaagtgctaccaggtgtaatgggcctaccttgactcactactacggcttacacgtatccgcacgtgtatgaggaagcgtaggtttcttttgcttgagttaagtatactcgagatccacgagtatgctttaaacaagataaagactccaagtagcgggttttggtaaaagatgagaactgttatttttgttttatgtttctgacttcctctaaatgtaatattctaaactaggaatctgccaacggctggtttgcaggattctgctgacatgtaagtcactcattggctaaaagttgctgctttcagccgataggaattctaaatgtgtatggaccacccgtcgtggtggtcgtaaatgtatgtagccattggtgtaccttacaccaaggtcgaggaaatgttcaaacctctaacagacatcgcatctgttagagtaacaagtgactgtagccacttgtgcgtgtaaccacgttacacgatcggaccggccctctcgttagaatgacttctgcgcctcttccgctaagcgttgggctcccagtcgcgggcaaatgttggaggacctcgcctgtgatgcattgtatacgcgcaaatacatgaatacacgtttccatttgagatacacatcgaagtctttgtcgagcgttctgcgcctagtagtggtcgcttctagcctacacacgagttggaatagctccaggataggatagagtatacgtcacgtgcgcacaaatgcgtcctgtgtctcttgtgcagctcatataaacgcgaggctacacacatcttatccccagcactatactcctgccaacccatgcgagcgtttcagttctgcgtccttcgtgtcactttgtgggggtcgagactgccgtagtaggtagtcatcgtcgttcggatcgcgctccacgcgcggatcatggccctgttttgcgtatcacgcgctgaagacctcggtgtcatacgtatcagcaagtgaatgaattacattaggtcaacgcatatgggtaaatgcactcaatgtattcttgcgacggagcttcacgcaggaaattgctgcagattccatttaggttgcagtttgtaggtgtgcagtacacggaaccaatagcgttgtaaccttcgtcgcggaaacaatccccaactcattggcagcttcctagtttgcccacgtcctcgaaggtgatgccctcttcgttgatacactcgtcagtgtactccacattagctggccacttgacagtagccgtctccggtagaataggctctgcaggacgcgctgcttggtaaaccggatgatgttgtttaagctcggcgagaagcttattcatctttggcttctccaacaaccgctgaagtatcttcgccatcagtgtgtgcacttttcacaggccacctctttgccatgtaccgcgctaggcgaaaccttttcgtcggccaagggttgcggcgttgttttctcgcgtgacggatttcgtcatgctccgccgccgtagggacttcatcgcattcggcgagaagtgatgcctcatccatgctgtcatcatcactgcccggatcgtttgcattgaccgcgagctgaacggctcctacagcaccaggatcgcgagaatcacacagttcctcgcatggacgagcttgccccccccctccgaatcacccgacgaatcgcaagtcaagtcgatggtgaaggtgcagggcgtgttaacgcaagtttcactctcttgagcatcagcaccaaccccggtgactgcagtggagactgaggcatctgaatgcatatacgcgataaccaaacatgcaaggttagaactcgtttgcaggaaatcagcaaaatcagcactacacgtcggcaacgaattaacaaataattgcccgtgttcgtagcgcaggctacaacgatgctgcttgtttcgagttcacctgcagcctctgcatggtcagcttctgctctggtatactgctcacggcggctgtctacatgcgcctcccgcgtggacgccaccactgttcggaaagagtcttctatcacggtacgaagaccagccgcaactagactggagcgagtgggtgcattaacctctccgtcgaccaagcgatacctacatagcgtgcgccatttgacactatcaggcgggaatgcgttaccgaagcggtctttcatcagctacatcttattggtaagaggcagcggctcggcggtgtctacgcgcggaggaaattcatcatccgttgtgtcgatacgatggaccactgcgacgcgatggcctctcacatcgccgcacacaaaggccctggagaagtactcgatagtatctccagcgtggagttcctcgtaggggagaatgaagggcgcgggtgccgacgagggggccttcatgaacagcgtggttggtgttggctcgtgtgtgtgttctgacagagaaatcgcccctagcatgtacccaccttaatttgcaatctagggctacctgtttctgagaaagtactacggtgctgggcgtcggcaccgaggtcaagttaacgacctctgcttggctagtatggatacggctacaggtccactagcccactgaccgcagttgttggtagaccatgtgttaaactactcctgcgcatgtcgttcgcctccaagacgcgcgagtggggtatcatttggctcgcgatatccttatctacatgttccatgcgagcaaatggctcatcctatccctccaggatgcgcgtgtgaatcgctttgtattgagataacctatatgccccatgcgagtaaacgagtcctgtgctcgccacacgcctcccagacgcgcgagcgtattggcagccgctttgtagcatactagtctgtaaggtccatacgagtaaatgacttctgcgccggccacacatctcttcagctccctaaagtagtgcctgaggctcgaaaatactcctggcctggtagtccatgcgaggaaaaagtgatctagctctttgcatttgctgaaatacgccgcgagcttcctcgtagtgatacacgcggagattgagccgtgcaccttgatttgggactggccaccacccgtttataagaaattagcagcgtgttgtaccagacgagccttcagaatggaccgtccatcgtccctttccggaccgtccatcgtcctctgggctgtaccggttctatctgtttggtgttattcactttttccttggtgctgctaacgtttcctcgttgctacgcgacgcttccacatccgttgaatacgttagggtccaaaccgcggtagctgccagtcaccgcctgcactgattcgtttgcgagtcttcgcctaagttattccgctagggtcacggtgccttcctcccgtcgttgaatctcatcgatgctgcttcctcgttacaaaggatgactacatcgcttgaagcttagcgtacatacatcaccaaccaaaggctctcttgttgtaactacatccctaagcgcctatcgtacttgctcaagggtgttgtcactcgcgaccgtaatccattactactggcatcaaatgcgcgaaggacttagcgctgatcgcttccatatatgtttttgattaaacgactatatcgtgtattatacacgattgaatctatagaatattgtatgagacacgataacagaacttagcgatagtgagacaaacggagtttgaacgcttccacgtactattgaaagcagcattgtcgattatcaatgtacgactagggtagatgggagccttcaacgccgcatgtgcatgaaggaagcttccatgctcagcccgtggtaacacaccgctcataatagcgacaaatataccctttaaaacaacatcatattttcatctggaaatgccacttatatattgtcagcaaggttttatctaaccgcatatgaattcgtggtgcttctgtcgctgtcaccgtgaggatgccgcttcgtgaaccttgggagtcgtcccttgacttgagtagcttctgacatgctacttggtgatccatgtaggaggcgagacttaccccacattcattttagaacgagatgagtccaccagcaaacagaaaagtggacacccctgtaccatacatgatagtagttagtaaagcacatccgtatcgtgtatgtacacgttaaacgaaccctgtcgctccgtttccgagctattcgcgtctttgcgggtctgtcttgaggctccttcatgatcagaacctaaacgattccgcaacacatatatatatatatatacaacgtcagaatatctgaaagcgcttctgcatcgtagcaagttgtacccgatggcctggcttcgacggcgatactcgattccagggcttggtcaatctacacaaccgtccatttgctctggacgaagcaccggggcatcaatcgcgaagcacgctggacctggataatctaagctttcctttgagcatactaaagcacgttggggggtcagcagtcgttctggattattgaaggcgagccccatcacgctcacggagtgagtgtgagttggggctgcccccgaataattccccgacgtgatcgggaacgagctgctggcccaactgtccgagcacacgcataacgttagtagcatgagatagcagtgagaacaagagagagagcatgtagtgcatggataacgtgcccattgcgggtacagctagcagttgacgcccccatgctcgaactgatgatcttgcgctacttggccccgagcgtggacgagtagccggtgttggttgttgccgagcgtggtaggaagctgggtccttgcgggcgtaaccgtggagcaactcagcagcgtgggtgtgttgttgtccgatggtgggttgctgggaacgacggtgccaccgagcagcaggccgacagccgagaaggttgggtcaatgcgttgctgtacgtaccgcgggtggagacgcgagctgcccccagtataggaggtaggaatagtgagcggggccgcccgctgtgtcgaagagtcgggtgcgtgccgccgggcgtgcggtcaagcgtgccgtggtggcgtgtcggggctgctggggccctgcgcccgacggtgcaaactcttgactggcccagaaccaactgctcaaactacactactgccacgttcggctggggacaaagcatgtaccggttgctcggtccaagaaaaccgcccgcttgaatggcatactaaacctactggtgaccgcgcgcggcttggtgtgcgtgtgcatcttggtatccacgtgcgccttggtgtccgcgtgcggctcgccgtccactgtcacctcgtccttcttccacgtggctttatccttccatcggaaaacataatttccccgctacactcggaaatacaccattcggtacatacacgataacgttagaattataccaggtacaatacaagctacacgaatgtcaccttgtatcaaatccacatctgtggtactttcgtcggcccgcatacggtcccttcctcatcttcgctgctatcaaaccatacaagttagtttgtacatctctagaaacctgaacaaacgttaacagtacatcaacaacgcaccttacagacttccttaggatccagcaatggcacccacacgctcgcgttgtgcctcgtgtgcttcagttgcttgagacgaaggcgacttccgcggggttcctgggtgcccatttggccttgaaagctggtatggacacggggaagatggccggatggggtctgtgcggtggcggcgaattttctacggtgatctcgaaacgagtggcgtacgaaaacgcctgtaatcccaaatacggatttggcgaacacctctagcaccttatttttaggaaatacgaagatcaaatactacacacggctctgcagactgatcgggaaaggatgggacacaaaccaaccctcgattgacttcaagtttgtatgtctttatacaaaaaataggtggaaaaatccttaatatgtataatacaacttaagctttttgtctaatcgtttctaatacagcgtctcgcgctggggggattaaaatcttcaagagtgccccctcttctaacgatgaaatggctgatgatgaaggcgatagatcacactttacgttcggttttcggtttggttaacgtgtgtgaggaccacaggacatgtgtgcatgcggttgttaggcaacataggtcaccacaactgatacggtgccgctggcctcgctcataacactattgacttacttcagactaggtaggctgttgaatcatcaaccagccagtcatatgaaccttcctgtcattgttttttttctaagcgatttgaatcaacgctcacagcgcattccgttagcacccctctctagttttcaatgcacagtcatacgggctaaccctttggaaagccccatgtttacagtactgtaccccctactaaagttcagatccacctccccataagcgcgcctccttgcgccttgcattgcactccacatcaactcacaaaggtgcttaggtactgagttaacatccaaagaggattggttttgatttgcctgcaacagtctcttgcacaaccatataacttaatctagtgtttgtacgttttgggtgcatttatcacctatcattattcaagagatattagatgtgcttggcgcgcttatcgggaggtagatctgtattctccgtcctctaactgataatcctgtctgtgcgtcactccgtcacgctttccgcccctactgcatagacctgtcgtctcgactacattatcgcggccctatcgcatgcattatccactcatcaaatcgaatcgcactggctttttacctacatgcgaaattacaaaaatagccacaatcacgctaaaatcgcacttatgcggcggagtctatcggactttaccgggtgtgattatcatattccccattttgaaagttggcacgcggcagacggacggaccgaggcggctagcgggatggcgcctggcatagcgaagcgagtggcgaactgcagcggcagtggacacacacaacagtgagtacatgcatacctatacatgaataaactactttaccgtttcgggagttccgccggttgggataactggtactctcagggcagtcgagggtttatagtacggaattaggggtagattggtgcttattaggcgttcttagggacacctagttaagagtccgtgggatgttgaagtaggccgccatacctacgagccggcccactccgcgtcgagacacccacggacggcgcagccgccggacagtcgctctgaatccacaacattgctactgtgtatgagtgtccaatttaattatttggcatgattatactgtaatactgtggctttctgctttaaaaccgttacaatacttaataaggggtgttttaaacgccttttttaggataacaaagattgcagctggcacccgccgccgtaccaagacttagctctgccacaccttttgctcttcggagccgcaaccctgaggtgcccatgtttgcccgccggcagcatgggaagtctcatacccaaccgagttttggcagatccatgtggcgataaaagccggctttgccgggccgcctgtttaaaactcggagtagtggttgtgttacactattagtgtgtgggaccggcacgttggattgggggaaacctcggttccgtgcttctgtgtccgcgacagagcgcatgcggcctgccacgtggcttgggtggggactcaagctgagccactggggacagtgacttgacggcttatggcttaccttttgtttagcggcaaactgagaccgtcagtttcgttcggggggcgacggaaatatttttgcttcggcaactagaaccgcttaccgcatttccgacccactcacacccaaacatacaacccaataacacacaagccaaaagagagcgatatttgcattgctacatacgggtttctagcctattgcgacctgtgccgtagcagaagaaagcttgatgtgtgctgccttgcctacgctttttcaggttatgtaccgatttgcggtccaaacgatccttcgatgcctatgataccagtggacgttccagtaatcaaagcaatacccaacaactgacccattaccccttccaaccgaaagtggttaattgcctgggctgtcagacactctaccacggtcaccaaaggaagtgaccacaacgatatagtggggagttgtcgcttcagcaccacgatggatccgctgccaatttctccaaaggtattgagaaacggcggcaataaagcgggttgtacttcaaggcggtggaagtgggggtgaggaactgaaagcaaaaaaaaacataccggttcaaaagctaggctaatgaggcgtcttaccgtcgtttaaattgcagttggtataattacactgggaatgccgtaggtgatgtggtcacattaggctttttctgcgaacacggattgcaaacaggcacagacgtcccttcacagtaacgcacggtattaatctcttcaaggcggtgcggcggaagaaaaacagcataggcgatgccgaacttactcacctcctaacatagcttagaaccatacatagtgacatgttacttttacggcggactagtagatatttgattgttgttttgcagggttcatggctcgaaaacgaacgtatacgagcgaggacgatgtcagagcagcatatcctgcacctgatgaagacgaaaccccagcggaaaagaaaagacggctcaacaacctgaactcggcgttgtcacgttttcgaaagcagcagagagaagcaacggggcgtgatacggaagctgaaatacctagggtgattgatgaactacggtccgttgagatcaggcggcgagaggaaagcacgaaatcagaggctgcgggtgtaactaccgtggtcgttcctactcttcaagcaccaggggccagctccgtcactgcggatgcggtagggcacacactttttcaggcccgtccactcgcgcgtgaacggacgaggccatcgcgaagaagggcggatatgactccttcccaactagctcgcgctcgcgaagcagacaaatctcggcagcggcgtaatagagcaaatcggtcggcgtctcaggttattcgcgatagggcagcagacgctgctcggtacagagagaggagagatcgcatgcctctgaacgaggtagaggtggctcgagatttaaatcgcgactgccagcacagcactcggcctgctcgcactcagcagcaaatacatgaggtaagggaaaccaacgcagcaaccactcatgcctcgcgtagagccatgtctgaagaggagcgtcaagtggttataccttttgcactatacaactttctgttattctgcaccaatattgaagcaactttattcgttggtcgtcttgaggactcaacaaaatacaagggtctaagcttctccactattgttttgcatctgcccttccgcgacatagcccagccttttcgcgatagaacaaagtgtataagctcaacggacccaagagatggtgcattccctaaaataaaattgtcatttggtttctatgcatccataatagctttagataaaataggttatcttcaatagaccaaggttatgtgaagccaagtacccagtcctattaaagtgacaaggtagcaataggatagccttgcggaataccaaccgctccaacctcctctacaggtcctttgtccacggatcctgcaaactcaggaatgagccgcgttcgagctgagcgagattgggcttttcgagttgagtaagagattctgatgtgagatcttcaccttcatcaattccagtatctaaatttctgagtctagaaccttctaaacagttaaaaaccaaccttaacgggaggcttcacctgatcggatttgggctgctctagcagctttactgctatcccagaataaatgttgttttgaaatagaaacatcttaccaaaaaataaatgcagttcgtgtaaacatctcgttgatgatgatattataccgtgttgcagcaacttgcgcatgctcataacagcaaatactgttcgtactagtgcacgcattttcatattgcgcaaaaaatgcgatgcccagttaattatttcagatagaataccagtggttatttgggctttctgagccctgatcgttagcaaatagcttcgcgaactacttggaaaaagagctacaaaacagcgggttacagttatgcaattgtaaatatcgcgatatggtgactactactagtatattgatgactcatagagtaacggatgtccacctgcaaacattgtgtgcgccgcaaggttttcggttcatattagtttagtatgttggctcccaacggtgctcagttctcgctagtctcttaccgcggcaactctgctcagttgtgatgggggaggggggaatcatgtcaacacatacttaagtacttaggtagactacagccttcgccgtggtgtctttctccttcacatcgactcgcggcttacacaacgagatattgcaacaacccctcggttcgcaacggaataagatagcaatctaaaggctgcacaaatactactgcattattactatttaccaaaggactgagtcagtagtttcaagctatcacaatcattttgtcaaatctcagtaaaaaatcactgatttatggaaatccctccgtcagtctgtgtgaaattccgtctgtcacaccctgtccactttaaaggtggtccacataatcgtacttaggcagccttggacgccaaagtcggtccgattacaagctgccgagcgcagcaaaggcggcacccgcgtgcgttcaagcgggccgcaggggccgccctacaattatgtactaataacacggcgagtagtgcagcgagccgacgaggcgagcggaacgggggcgattacgtcacccccaccgtgacgcttggcctagtatgatacttttcggaacacctgctaataattaaaatgggcccaccgcgtagtagcagagatagcaaagtccgcttaacatataataacactgcgagtagagcatagtgtcagcgatagctgggcttgccctactacatagtatatttcaattcagcgaacttggttaaatataagcatattgtaagccatagcagtacatagttagctataacagcgcgtagtcagcgatatgaacgtatagttagcgatagcagtacgtagaaaacgattgcaacggatacttagcgatagcagcgcatagtaaatgatagtaaatggtagcagcgtatagtaagcgatagaagcgcatagaaggcgataacaccggcgtaataggcgatagcagtgcgagtacatgtagcgagaggtacagtagctgaagacgattgattaatagtttcaggttagtttttgggtaatactttagggacgggtatatgatagctgcagcggtgctgagtgctcatctataaaggcatatagctacattggcttaaacgtgtggcatgtatctgtaacttatcgtattttgcggtaaaataatgggttctggggatagtagatgcctagacatgcattggagtggagattttattgtagttcatactggcatccctttgacgcgttcccccacactctaacaatattaacgaattagcattgcacgctatatgaattttgtacgcgacggcgatactttcgctactcaactataggtagaacgtaaaagtgttcatgtacatttaaaagtgttcatgtacattacgaagtagaataatttactgatacgcacgtcttagctcattaaaaatgagatttgaagcgggatacgtcgaaattaacgcagcccacagctcattcctgttgcgattggacacttcgcagtcttgttgtgcgactccgcatcgaggcacgtgcggctgtgtagttgttgccaaggcgtacggttgtactatatgctacaatgtgattggctggttccccggatttggtgattctgactggctaagagaaggtcaagttgaagttgccgtttgcatgggatctgcaaccacagtcgacctttagttttcgcagcctcaacaaaacatgttggagttagaagctaggacttcgtgtactcgttggtaagacacggtaggacagactcgtagtagccgttttgcttaactctttctaattcactttcggatttccttcctaacctacactcgactaccaagcctcgcccgcatcatctcaagtggttatgagcccaagctacgcagacaccgtgaagctcgtggaagacaactacttccactgggagttcaacatgcggatgaagctgtcgcgcaagggactcctcgcatcgtcaagccagagttcgaccagctgagtgaccgctccacggtacagtagaagaccgacgatctgaaggcccttggtgtgatcgctggagacgtgagtctcacataccaagtgtacatccctggagcgacaaccgctgctgaatcgtggctcctgcttgaggagccgttcaaccggaacactctcaagaatcggctcgtcgtcgccaagaagttgcacaacttcaagatggagcccgggacacggttcgcggcgcatgtggaccggttcaaggagctggtgctgcaaatggagacgattggtgaagctctggacgagactcgccaactcgtgctgctgctgggcagcctgacggaagaatcccggacgatcagtaccgtactcgagaacacgccgaacatgacgttggcgtacgcgatccagctctgtctggtgttgaagtctcggaggattcaacatcggctcgggagaaggcattcgcaacgaaaaaggagttccgcaagcgcgggttctccgggaagtgcttctactgcaagaagctcgggtacaaggaacaagagtgccgcaagaagaaggccgatgagggggggggagttttcttcatccccaaaacgtacccaaagtcccctaaaatcccccaaaacgttttggggactttcaataaaaaatgtttgttacttcccaaaatctcaattaaacgcctcccaaactgtcccaaaaaataactcttagtattgggataattaaatattagctattttttgtgtaatattccagaggcgcgatagcgcccgcgaagcagggccgcgcggtatttgcggaggcgtgcccagcgacgagcattccagtgagccgaacactgcactcgccaggtgagagaatctttttatcgcgagcgaagcgaacagcgggggcgccgaaggggcgcccagccaagaacaacgcggctggttactctaagctagatatataatgagtgttagtaaaagttaggttcatggttcctaaatatgaggtttgacgtttggggatttttggggtttggggtgcgttttggggatgaagaaatggacgccgatgagggacagggacaagtcgcgcaggaggcgtcggacttcgcgttcacggctacgggtatgatggcgaagtcggagtggcttgtggactccgatgccagttcggacatgaccagcatccgggacaagttcgtgtccatgaagtagctgaagacgccagtccgcatcacgatcgcggatggcacgaagatcgacgcagttgcgaagggcaccgtcggattgaagctgatggacgggacgtccgtcgcgttgtcggatgttctgtacatcccggaagttgatgggagcctcatctcggtgtcgaagctggcggagaaggacgtcgacgcacaattcagcaaggacaagtgtgtatttcgctttggtggcgtgacggtgatggaggccaagcgctgtggaaacgtctacaagctgaagacagtggtggacgaggtgtgtcgtgtggcgacgacatctcgtaaggagccatgggccgtcgtgcacgcccgtctcggccacatcccgtacaagcgctacgaacagcggttgagcatggccatggccgatggggtaccgcgcatcgcaggcaacgtgtcgacggataacgtgtgcgctggatgttgcatggggaaaatgcgcgctgacgacttcccacgtcaccctgacaacttggtcaagagtgccggcgtgctggatttggtgcacacggacgtcatgggtccgatgcagaccaagacacctggaggctgcacgtacgcagtgaccatcatcgatgactactcaagacacgtgacggtgtacttcatgaaggcgaaatcggaggtgctgttgaagttcaagaccttcaaggcagcaatggagaacgcaacgggcaagacgatcaagcgcctgcgttctgacaatggcagcgggtacacaggcaaggagttcaaagcctagcggcatcaagcatgcgaggacggtgccgtacacgcctcagcagaatggattggctgagcgcatgaacagaagtttggtggagatggcacgctgcatgctctaccatgagggaatcgacaagaagcggtgggctgaatctgtcaacacggctgcgtggatcatgaaccggatcccgaattcggtgaccgtgaagaccccccccacgagattgtgcaccgaggcaagcctccgctcaagaacatgaaggtctttggtgcacttggctacgcccacatcgccgacgagaagcgtcggaagctggatgcgaaggcgttcacgtgtcgattcctggaggtacgaagatggtgtgaagggatatctgtgacgaagtccgctcagattttggcgaacctcgtcggtcgactgcctttgacatgcttggtctaggacgcagtgattcagtatcaaccatggtacgcccggacgacgtcggtgatgaagaacctggtggagcccttgacgtatggagctggtgcccaagtgcaacttcgaagtcgaacaagcgtgtggaatacggatacgacagaagcaggactgctgaggttgttggccgacgatcgccaggttcagatgtgaagtgcagacgttgccgaggctcagatgaacggctaccggagtcgaccgaagtcctggggtgtcggcgctgtgcttgcggaccgttgccacgtccagaggccgcgcgctgataactggtgtcggcaaagagtaaggctgactacgtgcgtattcgggatgtgtgaggcttctaccacttggatgtgcttgctgcatcgcttgaagtccagccgaagtggcccgaggtcgaggagcccgtgctgcgtcattgccgaacttccgaaggtccagatgtgcttcggctaagcctctgacggctcagcgaggaaggtttccctggactccgaggaggttcagcctgagcttgctggacttcgctgaacatggctggatttggcggacgctggtggacactttgagttcaaggtccagcggagccttggaggctcagagtgctgttgaagttgtgctcgcgtcgggtcgctgtggagggtcgctgtgtcatgtcacgccatcccgtgattgcagacaaatcagctctgacgtctcccgtcgcaccctgacgacgcaccccatgtggccaatcacaagcgcgggatctgggttgctggcggtgattacgcccagagtcgctggattctgctggacgcatccgagtttcggcgaatcatcgctgagctcatgttgaagcgccgcacgcgactgcgcgttcctggcagctcgcaatacagtcttctcactgttgttttagtgtttccgaagggcgttttgcgcccccacatgataggttcatgtttgcatgtgtaagatttcaatcagtgtcgaatttgccccgaaagacgcacgtgtttggattttgtgtggtcgcgggtgtcaaggagcgcctctagtgaaattcaaggcccccatatagaccgattcggtaccccctgggtgtgaggagggctctgtttggctatttcatatcgttacgtgtcgaaccgacacttgggagcggctctcggcgtgtatttcattttggccggggggaagagcctgctcgttggttgtggaacgatcgtgcgactggctgggattcggcccggcatttggcgtggattgttcggtgtccgcctggcatttggagatcgggcgtggtgcgcggaagtcccagggcgtagagcgtgaaccctggatcaagacaggctcaagccgagccaactcacggggctactctaggtcgaggagcgatggagacctggttgtgcggctctcagctggagccgccggaggaagtaaagaagctgttaagacctggtccaagaactggaaagacgaggacagagtgcgggtggggtgtcgtgtctacattgaagaaaacccggggcagattgggctacgacacgtgcagacgggagcctgttaagtggggagcaagcgccgtttggagacactgggagacatctggactggacgtgaagttgctgtggttgacctccgactgggcccaaagcgtagccctaggaagagctattcaaggggatcacaagggaggtacacacacgtctcacccggttcaagtccaagttcatggagcatcagcggagtcttcattgcagtctagccgaggtctgtatggctgcaacggaggaggtgccaaggtcctatcaagaggcggttacgagtgaggatcgtgctcaacggaaggcagcgattgcaagtgagctcaagtcgctgatgacgaacaagacatggaagttggtgcccaagcccaaacaccagcgcgcgattgactgccgctgggtgttcgcgttgaagcgcgatgagactgggagagtcgttcggtacaaggctcgcctcgttgccaaggggtactcgcagcgacatggaatcgacgacgaggagacctactcaccggtggtgtacctgaactccatccgtgcgaaactcgcgaagtgctgcgccgacggaatggagattgatcaatgtgacatcgacatcgcgtttttgtatggaaagctcgaagaggagatctacatggtgttgccggaaggacttcgagaactgctggatttggctaaagctcaaggtggagatgacgtcatatgcctgctactgcagagtttgtatggactcaagcaagcgtctcacgtatggaacggggcgatcgacgcgcatctcaagagcatggggtttcaagctgccgatgccgacccgtgtgtctacacgagaggtgctggcgacgacgaatgcgtggtgtgtctctacgtcgatgacatgctgattgcatctcgccagcgggccatcattggctcggtgaaggcaggtatcgcggacaagtttcacaccaaggacctcgggcgcgatcgattcatccttggcatcgagatcgactacgatatggaggccaagacgctgggcatctgccagcgggcgtacaccgcgtcgatcatcaagaagttcggccaggcgaatgcgaaaccgtgcctgactccactcgacccaagtgtgcagttgaccaaggcggacggaccccaaaccggggaggacaaggccaagatgaagtcgaagccgtatcgcactctcgcgggaagtctgatgtacctggcgtgtggaactcgaccggacatttcagctgcagtggccaagctgagtcgttttctggagaaccccggtgagaagcgctgggatgctggtatccgtgtggtacggtacctgttgaagaacaagtatctcggaatcgtctacgatggattgcttggcacggagctcgtcgcgtattcggacgccgactgggctggtaaccgcgacgacagacgctctgtcagcggatgatgtgtggtgctcccgtggtttggcgctcgacttttcagaagacggtcgcgctgagttcgactgaggcggagtacatggctctcagcgaatgtgtgaaggaggtggtgtggatgcgacttctgctcaaggttttgggtgcggagcaggatggatctacggtgatctacgaggacaaccaaggtgccatggcgttggcgaagaatgtcggctaccactctcgcaccaagcacatcgacatcagataccacttcattcgcgagaaggttgcgactggtgaagttgaactggagtacgtcgactccaagaaccaacgcgctgacttcctagcgaagcgattgtctacgaagactcttcgctacctgcttgagagaagtaacgccattgatttactcgggtagactgcgaattgagtgggggtgttgcgattggacacttcgcagtctagttgtgcgactccgtatcgaggcacgtgcggctgtggagttgttgccaaggcgtacggttgtactatatgctacaatgtgattggctggttccccggatttggtgattctgactggctaagagaaggtcaagttgaagttgccgtttgcatgggatctgcaaccacagtcgacatttagttttcgcagcctcaacaaaacatgttggagttagaagctaggacttcgtgtactcgttggtaagacacggtaggacagactcgtagtagccgttttgcttaactctttctaattcactttcagatttccttcctaaccaacactcgactaccaagccttgccccgcataatctcaagtattccattcttagggctgtacaaaatgctgaaacgatgcagcacgatatatacacgttttttttaagaaaactagctcgaaacgtaatgctgagaacatgaatagcgaagccatcactttgggcttatcggctgatcacagaatgtaaatgctatagcctaccaacagtatagagaaacaaactatagttatgcgataacatgataaaataacaggtatacagacttcaaagtgagcagcacactgtagatagcaacaccgaattgatctaccccatcacgacatgtagctcatgccaaagtttaactctactacctgccgtagagaagcgtaggcagcctgctcttatagtgcagcgagcattgcgagcgaagcgccaactaacaaaaaattcaccgccgcgtagcggcggcgctcggctagtatctaaaaaggggcatgatttgcatgatgccccctccggtatctcatccatcagtaataattgaacgggaaaccagcatgtaggagtaggaaaaaggcacacaaatcacatcattaggatggttatcccccttgcactgtactagtacaatgtacttggggatcagagggagatcaaggattactacacgctcctccaccactgcatcatcgtctggccaccctcgagtcaatagaagccgctcaggagctgaatccgatcgaggcgtcggtagctggagatgcctgtacctctgcagagccgccgttttggcgtactcgccatcagtcaacgtgccggcgccggttgtggtcgcgaactacggctcgcagcagtatttccggtggctggtggaccagggaatcgacctcaaggggaagatcgctttggttcgctatgggaccaactaccgaggcctgaaggtgctagcggcgctggaacacggcatggcgggggtgctgatctactcagatccattagatgatcaataaattgtagggctggctcgctttatcggatacgtgtagcccacaatgccgaatcgcgtgtggaattttttgctaagaaattctggaaatttctcttcatgttgacgttgtgccttgattttctaccacgataacaaggaacctaatatccttgttaggatccgtgttatagtggtggaacagctatacagttatgtatagtgtgtcatcacacttcgcgttatgccgcataactgtggcggaaacgagctgacatctacgattggtgcttgcagtgcgagtccgaggtgcagccaagcagcggaaacgcatgaagtatggcaggaacaatgtgatagaaggcaggagaagccagtggaggatgagatgggacttgaaggtgctcgttcgccaggaaacctgcatggccaatgccatgcctgcattttattctgacttagctttagtataggaaagtttaacgagtgagggtgcttacagttgaagtgctgagcaggcgcgacgactcagggctctcattcttgaatcaacccacaagttagcaagtcatcctgcttccttactgctctggccaagcagtgtgtgttggctctccgcgacctcacagcgtgagctagaggtcacacaccatcgtagcgagttagcagtgcttccgcttctcaagtaacaagtacagcaagcgtaacaaggacaacaaatacagctacaacttctacagcaactccgtcgtcaccgactcaaccccagcttcttctgtcaagtgctaccaactcgcagcactaggctgagctcttcagcgtgagctcggcctactactgtgacatagttgatcttcatggcaatgacgacatgaaacacggctcgacgcgtgctgcgcagcgatacagccccagcacgtcgcctcttggagttggaggacggacctcgtgaagaaagcgcttctggtgccacgaaccatagtcgaactacagcaactcaacgtatcgaccagctggaagctggattgacggatttaaggcaaggattttgaggcgaggcaggtgaacgcctttatcgtccagggtgtatagttgcgtgcccagcggttgggtgagtccaaacggaaaacccaagtgggggtcagtctccaattggaatacgagtatcccgaccggagttggcgtgtgaccttgtgtaatccctctaggtagcgtttatcttcggtaagtccggagttcaccacctgagttgctttcacaatatcaatcagatacagaataatacaatcgcccacgttcgtttccaaacggagtcagtacggctgggggatcagactattagtggagtcgtccccaaacaccaatcaatacaaacagagagttatacacgatatacagccgctcttattctttcggacccttgagcggtgggtcttcggtccaatcaacaaagcctagttcagaacccttgtcggctccaaactcactggcttactcaaatcaatatcgcgcaccactcccggggccgaacactagaattcgttccggaagactaaccgattcacacacaggtatacaatcctaccacacagcagtctctcaatcaagttcaaggggtgactactaacaacctcccaaaccgcaagttaataatatgaaatgggttaccgttcggttcgccaactggaatatgaaatggcggatcactccttagcgcgcgtcgccgtggtccccaccaattatatctctaggtcgtagtggagtctcgcacaacgggcgtacgcgtgcccgaggtgaccttatccgcaagaaatgcgtcgccgggcccgggtaatggcttcctgaggcttggccggccgacgtgtcactcacaaggcaaaacgaactctctgttgaatttagtgctagacgatctctactagctatctttccacatgcaggcttcacttttatcttggtttcactatgggtccaggtgccgtaatcatcttgaacatccggagatacgcaaggaatcaggcgacccctcgtgcataacagatcctggtcggtcgcgttggtcggtcgttaacatcttggccagactatacttggagtttggaacctttcttgatgggtggccactggattttcccccgcagattcaaggactcatctggatccaaaccagctctccatctcgatccaaatccagaattctagccatccattcgaaacactgctcatcccggtgcctctgcgtcgtcgcttggctcgatacatgctcggtcggcaacagcaaccacatacatgccttcgggggcattcatcacacacataagcactctggcgtatgccaactagtcgtcctacgcagcgcgtcaccactcgtagcagctcagttgtccggagtgcacaatctggatccaaacaatgactgtcaatcttcttctatcaccgcgtcccagccacacttgtcgcgaagtaaaattacttccggagagatcagcggcagcgtcttccggaatggggagcttgagttcggtcacttcatcgagagtatatccgggcaacgttggtggcacttgcgggagtttgcaaatttgcctcgccacaatttgcggcagctcatgatagtctacgggttgatgtcaccgctgaattgacgaacctgaaagcagtgtcagtgcagaaatgaccgagattaaggggcatctgtcgaatctggtgcaagcgctgcacaacatgtcaacgacgctgaaccagactcaagcggctgaagcaacggctcaacagatagctgcggaagctcgggcccaagcccaggttacccaacagagtgccccagctacagcgtcaactgcgccgattacgacccagccccaagccgtatccagcatgctgagactccggcgaccgctgccgtgaacatgatgactccggccgaggcaagaaggacgtttgcgtccacccgtggagatggacgtccaccattacgcaagatggacgtccgccaacatttgatggattaattgacggaatcaagctcaactcgtttctctttcaattcgagtcctactttcagcagaagggctaccgtgagatcgagatgatcattggcttcctggaaaattgaaccagtgcgttcggaagaatgctgcggtttggtacgagcgctacatgacggatgatacgacgatcaagttgtggagcgttatgaaggttgcgatgatccgagagtttagcgagccaaatttccaggctaaagtgcgcaaccagctgctgcaattgaagcagactggagcgtgccgcggctacgtgaataaatttcgtgaactacaacgagtagtgggtcttgatgaactgacggcgattaacgtgttcgtgaatggactggtcaacacgcaaatgaagattgcaatccaacgcaagcagccgattactctgaccgctgcggtacaagaaggattcctcgagtgcgagctgtaggaaaaacgagtaacgaccagccagcgcggcaatgaccatgtcggctttgggaaaaagcaacaaggagtgaaacaaaagcggaacaacgagaaaattgctcagcgtggcaatacttcgggggaaaattctcgtagggccacgacgacgccaggaacgctttgctctcactgcggacgtgggattcacaaggtggaggactgttgggtgctacgcccagagaagcagccccacagtttgcagcggaagcagcagctgcacaaccgaatctacgcactcttggagtcgttagatatcggggacgagcagaaccgcccgtccaccagtgaggggcaaactagcccgtccattggaggccgaccctctagtggacaggaagatgaagtgctcgaccgagtgagagatgttgtatgtcgtttagacgctgtgaatttgatggatcatggagaaaaagatgaaactcaagaaaaacctgaagccaagcgtcatttgtactgtttgttgtatactcagagtacagtgcactgttccttgcggaacctttgcattatcaactcgaactttatcgacagtggagctactatgaatggtgtcagtcctaggttctgttcggaaaacggattgtgggatcaagtcgttgaccacaacgagcccatggagatcactcttgtggctaagcagaccatgactgtaccgacctaaaccgtccagctgactgtatacatgaataatttcgagccgtacacgaatgacttcctcgtcatcgatgtccctgaagagcaagatctgctgttgggtatgccatggctgaaagccgtgaatcctgacattgattgggtcaatgagcgcgtggggcctcgtgtgccgccgctccaagtagagaatctggacagcaccacccgtaagaagaaacgaaaaaagaagaaaacgaagaaagtgaagacacttcacaaaccagatcgacctgcggtgaaaatcggaggtcagcgacacccagtgtcgccgcgaaagaataaggagactggaggtgactacttcacgcacagattttattcagcgacttccggaacaacaaagtttatcaccgccaagcaatttcggcgcatgcttcgaaagcctcacggcattgaatgcatcttcgtaattcgtccgaagacagaaaaagagcggcaaggaatcggaagctgttgacattgaagtgtttagtgatcatcccgtctacccagtgctggcaaagcacaaatcccttttcaagcagaagttgccttcgtgtctgccgccgcgcgagcatggagagtaccaaatggagatggacacgcaagaagccatcttccgtcggcagtggcgacagtcaccggcccaagagaaggtcataacggactgggtcgaagcattgcgcgctgccggattgattcggccttcgacgtctccgcatggagcaccaaccttttgcgtgaaaaagcttgttgggtggagaatagtacacgattatcgtgcaatgaattctcacacaattcgccgtgtgttgccgatgcccaggaaggatacgatcatcgagaaaatgcagggcgcgtactggtactcctgtatggacttgctgagcgggtattatcagttcaggatgagagactgtgatattccgtatacagcttttcaaacaccggatggagcttttgaatatttcgtattggcgatgggtctttgtaatgctccagccacgttcaacgaaggcattcgccgtattttgagaggcctcatcgatatttgtcagtgctacttcgatgatatctatgtgtacaccgaggatacatttggaggctctcgaccgcgtgctgacgagactcgaagagcacaaattctacgtgaagcttagcaaatgtgttttctgcgtcgatgaaattccctgtctaggagattacgtgggacgtagtggtgttcgaatcgatcccaagaaagtggagatacttcgtgactggcccttacctcgtacccggagcgaactgcagtcgttcctgggtactgcagtctacgtccagagattttgtcgggactttgcgtccgatgctggaccattgtttgacatgttgaaagggccggtgaagcgagtaattcgctggagtgacgcgctgcgagcacacttcatatcgctgaaggaaaagattgctgcaacgccagtagtcgcagtccctgacttcaataaaccttttggactgcgcatggatgctagtgaccacgctgttggcggcatcctgtttcaggaggaggtcaggggtgatgcagtagttgagcgcccgatagcgttcggtggcagaaagtataaagacgccgagaaaaaaatactccattcgcgagaaggagctattggcgatttaatttgggcttcgtttgtggagactgtatctactggacaaaccattcgtagttgagacagaccaccgctcgcttgaaacagttttcaagtagaagacaatttcgcgtcgcattgcgcgctggtgcgatgaactcagcgagtacccgattacgtttcgctacaccaagggcgagaagaacacggtggcggatggaatatcgcgccgccctgacttcatgcaaggtacctcgcaaacccttgcggcgatagtaacgcggaaacaagtgcgagagcgtgtcgaactggggttggcgaaccttgtgaagcaagccacgaaacgatacgcagacgacccgtttactgcaactctccaagagcatctgagctctgcagaggcggaaataaagccccctgtgcgtcatttcgagcgatacagcagctcgaataagcaaatcttctacagagcgcctagtgatgaccgcgcccgactagtactgccgaatatttccgagattattgaggcgctgttgtacgaatttcatgacgctaagtgctatgacatccaggtgtggagaggacactccgattggtagagcgagactactattggcgatcgatggagaaatctgttcgtgcttatatccggtcgtgtgaagtgtgtcagagaaccaagagcagaaacaccaagccccctgggctactacgatcgcatgagatccctgcagcgaggtggacgcatctggctatggatttcatcgtggcacttcctgagactagcgaaggctacgatgcgatcatggtcgtcattgatcgactgacgaagcgtgcgcatttcctgtcaacgacaactattgcaacgacacgagagacggctgagttatatcgcgaccgcacctttgtgcttcatgggctaccagaggagcttctttcggacagggattcgaagtttacctcggagctgtggacaaacctgtgcgagatgttaggtacccggcagaaattgactacggctttccgtcaacaggcaaatggtgtcacggagagagtgaaccagacctgagaaatattttcccgcgtacaccaacatcaatagtgatgactgggataaatacatctctctcgcggagttcgcgtacaacgcaaggtatcaagcgtctgttggtatgtcccctttcgaggctgacattggctatttgcccgcaacacctgcgctgtctcgtaagtctactagcgtgctgagagacaaaccacgactcggaacggagttcctcgagcagcaacaagacgttttggctggtgtgcgccggcagctgcccaagatcgtatgagccactattattgtcacaatcgtccaacacagacattcgctgttggcgatcaagtactgctatctacgacaaatttggccgattttcatgctggtacgaccaagaaaaagttaggacctcgatggattggcccctatctcgtggtggagcagattggacatgattactaccgactgcagttgcctacgcgggtgaaattccacccagtgttccacacttccctcctgaaaccgtacgttgccagtgatcgcccggaccaagaccttttcaaggttcggctgccagatggtagcgatggcgagctggttgaggacatcgttggctatcgcagcaggaaggggaagaaggaataccacgtaaaatggctcggtaagtccaagttgacttgggagcctctacaatatgttcaagacctcattgctccctaccatcggcgccaagccagcaagtgcaagccacccaagacgtcatgagcagaggacttctcttggaggagggcatgtggcggaaacgagctgacatctacgagtggtgcttgcagtgcgagtccgaggtgcagccaagcagcggaaacgcatgaagtatggcaggaacaatgtgatagaaggcaggagaagccagtggaggatgagatgggacttgaaggtgctcgttcgccaggaaacctgcatggccaatgccgtgcctgcattttattctgacttagcttcagtataggaaagtttaacgagtgagggtgcttacagttgaagtgctgagcaggcgcgacgactcagggctctcattcttgaatcaacccacaagttagcaagtcgacctgcttccttactgctctggccaagcagtgtgtgttggctctccgcgacctcacagcgtgagctagaggtcacacaccatcgtagcgagttagcagtgcttccgcttctcaagtaacaagtacagcaagcgtaacaaggacaacaaatacagctacaacttctacagcaactccgtcgtcaccgactcaaccccagcttcttctgtcaagtgctaccaactcgcagcactaggctgagctcttcagcgtgagctcggcctactactgtcataacctatgcgatgagccctgatactgtatctcgatgatgccacacacgcaacaggaacaagtcttgagtcggaattccggccgatggcttccaacgacatgcgcgttcaggaattctctgcgtttcttgggctcggcgaattcttactaacttatacgctgtacttcgaatgcctgtgattgtcttgagcatcgtacgtgcataccgactttatttagttataatgggggtggtagagtgcttcctgcagcagacgaaccaagttcaacaactcaggcactccagtaaattactatcaacttttcactcacctacatatattacgaaatttatttctgcctacggatcaaagtcattgtctggatcgatgatgccaacttccgtatcgagaagtcctgcagcctggagcaatgcaaacacgtcttccccctcgtcgtcctctagtagagaaggcagctcacactgctgatcaatcgtgggcttgtcaataatccctgctttacggaaccagttgcaaatggtagacgttgtcatgtcattccacgtctcgttcatccaccaagctatcaatacacgatctggggctctcattttgaacggctgacttaggcggttttcgcccggggcctgcgatcctcgttctgcctttcggcattttgacttgtgcggggggaggtgtggccgtaaattacatgcggtatttcaatcacgacatcgcgttggggcaatcgcgctgtacgaattaagatcactgattggctccccattataactacaagtaaatacaatgtaaataaggtaaggtagtagtagatcgcaaagcccgtcaacatggacgacaacaaggccaaaacttgaaccaccgatcaaactgccgaatgtagacgctgccagcatttttcgccttggagatgatggccattataaaagaggtaccaagtaaaatgtgaagaagattggcaagtgaggctagcattgaacaaaacttgcagagctgctacccatcgaatcattaatccacactgacaaagtactcggcggcagcgttgacgatgcgcgtgacttcgtcgacgtgggtctgaattgtagacgaatcgtcgtagaaagctagacaatccgtgataccagggaaggcagcacccgcgtagccctcgtagaaccccggtccgaagatcacgtgcttgtaccacggacggtggggcagtccgtcgctcgacagcagttgtcgctcgagctggacggccttgttgttccacgcactcagtgccgacacgtctgagctggtctgcagctcgagtgccgtggcctggaacgcgtccgcgttggcgccaaacttgtcgatagccgcgtacagttgcgccagctccacgctcctgtcggcgtcagccagacgcttctcgagctgttgcaggccgtcatgcatgacgagcgcgtacgaggagaagtcgaaggggatgacggcgtcgttggcgaggcgcatggccagcacgccccaccacttggccatgctggcgtgggacgcgtagtgcggatctccctgcgtctccatgtagtgcaagctgtccatggtgctgtggtaggtgccgtaggacgcgtaggtcagtccgaacgccaggttgacggagatgacgcccaggtgctggtagaacggcgtgaagtcggagcccgagcccatgaagttgatgaggtgctcgggcgcgagcgtccggtcggccgcgtcaccaggggagggcagacctcccggagtagagcgcgcctccgtcatctgcttggtccactggtccagcaaactcgaggcgctatcaagggcgctgttgttgccgtggaacgcgttcgccggcaacagactggccgtgtcctgcacgaacttggcgatggacggagcggcgctggcgctcacgagaggacccaccagcaagtcgacgttgagataggccacggcctcctccttgagcagcttggcgttgtcttcgacccactcggtgcttccgagcagcgcatactcctcgccgtcccatgatccaagcacaatggtgcggcgcggacgccagccagtctccagtaggtctccaagtccacgcgcgatctccattagcgttgccgatccactgctagggtccaccgccccgcagacccacgcgtcgcggtggttgcccagcaccacacgcttgtccggctcctccgagccttcaatggttccgatgacgtcccaaatggcgccgacgtggttgtccatgaccacgtccaggttgagcaccagcgcgccgtcgtctccgagcttgtactcgagcgggagtcctccttgccacgcgctttgagccttctgcccgcccaaagctaccaagatgcgacgcgcttggccgtaagacagcggcagcactggaactcgagggatgttggtcacctcctcgtacgtgagacgcgcagccccctccaccgacgcccagccgggcgtcatcgggtctcccgagtacagagggatgtagttgaccgagccgcgctggaacgagtcctcggaccggtagaagccctcggggtacaccgggccgcgcgtgaagccgtcttcgttcgggtccgagtagatgagcaccccagccatgtcatacttctcggccgccatgaccttgagcccgcgcatgttggcgccgtagcgcaccagcgcgattttccccttgagcgtgacgttgttgctcgcgagccactcgaagtcctgctgcgtgccgaagttggcgtacacgaccgacgccgtcacgttgcccgtggccgagtacgcgaggaacggcggcagcgccgtcgggtccgtcgtgcacgagtcgtcgacgacggatccctccgtcaggttgagctcctgtacgctctgctcgggcgacacgatcgctagacgacggtgcaccgggtagctcagcagcgtgtagtattctaccacctcggcgtggatgccgtaggattcccactgccgcgcagtgtacagcgccgtctcataatcctgcttggtgccgcaagtgtgcggcacgctggcgtacgcgtgcaggaactcgcggagcttgtcgggctgtacgccgtccacgaacgctcgctcgacgctgctcaagggctgcacctcctccgccttggtcagcgttgtcgtgatggtggtgatgaccgcatcttcaggcgcagaggttggggtccacgtctgcagggtgaagaggtagctgccgaggaagacgagcgcgccaacgagtccagcgacgcgcacggcatcgccaaaacgtctttgaggggcgttggcgatggggacagcgggggtcggagcttgaccatcagacgacgtgccgtacgacttcaacggagcgaacgacattgccctccagtgggctacgtgagacttgaggcgcgtccggtcgagcaggttgaagagtgagagtgctagacgcacgccacggacgtgaggacagtgattggcaagcgatcttgcgctgagggtggccgccaccaactcatgggccgtgagctgacacacacacacacatcatgcaaatcggccggggtctgcttcagggggaatgcagaggcaggacttcatcgcctggaaccagatgagtgtttgtttggacgttgaagtggcgcacacactcctcaatttgctcaaacatcgactgtattaacagcacaacgtacagtaattacatcaattcacaccttacatagctctcacttcaatatccgcgcagcttggtcgaccctcccctcaccaatgccgctgcttgtcgggcggcactcgtgacgcttccgtcggtcgggtatgtgaggtgcgcgatcgcgttgatgccgttggcgcagaccgggtcgcccaggttgcagaactccaccgccttgggtccgtacgtggtgctcgtgctcgagatcgtctggccgaagagcatcagggggttgccgaacgtcacgatggccttaatacgcggcgccaacgcctccgggatcacttcaccgatgccgaggaccgtcttgatgccgatggtgatgtcggcgagtacccgccgaggtcgaacacggtgttggggcattgctgcgccacggacaccacgtgccgggtcatgtcggtggctccagggccggcgctcagttgagttgcgtccgcgaggtagttgacggcgtacgaggacatgctcatgtccccgagcttggcggtgatactcgccaccaagggctcgccacagattccgagacccggcatctcagtactgccgcgagcgaagacaatggggacgtctggacagtaggcacggacgctgggagcgaacagaagcaggagcaacccggagaccatcaagcggatcgagaacgctggcgtcgctgatgcttgcacttgtcttgccagagatcagaagaatatcggaatgaaagagcctgaaccaggttacagtagagtgatcgttgcggtgattctctatgccgtcgttcgtctcggccgctccttggtgatatctgcgtgcactccaacatgttaccaggaccgacctactgcttatcttatcgagtagcggacagctaacgtcatttgcttgaagcactacatgtagctataccaaagcaagactcactcatgtctccgcagaagtgcggccatattgcgggcagaatagcaatagattcctcgtggtcttaggcatttggaaggtcgagtgtattgagttcaccgtagaaatcacgtgaagtggcaagataggaggtgccaaggctccaccagtgtagattttctcctaagatggctaccgcgatacagctttgtacaacggccaactcgacctcattccttgccagacaaagagtagaaaacgttagactgttcgtagtgtagttgggtcgcgaaccggactagcatacgcataaatctgatgattcttgtataacgcaaaatagggtgacatcattttagagactgtagggatacccagggtttttattcagatcaccgtcatttcggcattctcttccgtacagctacatgtattattaataataagcgtcaccaagaagagcgtacgcatccttctcgtacttcttggccaggcttataactgtatagagcgattgtttagtaggagcgatcggcgtcgtggccgctctaaccggtcggtcctacaatgcagaccaagccgcatgcactcaccgaatgcgttatacccatccaaagaatgatccgctccattcgagctgctggatagggagaaggagggaaccaactttactggtgtcgctcattccagaaatcgcctccaaccacgcactgacaatgcgtatccttcatttgattctagtgacggtagttgccctcctggcgatcgccgctatcctatcagcagcagcagaacgaagccaaatcaagacggacatggctggtcgggaccttgtcggcggtggaaggtcactgcgggtggatgcacgggtcaatgctgatgacgacgtggggcgacctgtcgtccattaagtcgacagtgcgcaacttttttttcaagaaagggggtcaagtgcagcggccgacagccgacgcgactgtaacggagatatctgatgccgctgtaaagaagagcttggggctggatgggctttcaggggacgccctcaagacgcacaagaattacgtgagcttccggtcgtgggaagacatcggaaaagtctccgcttggtcgaagttgaaactctccccacgccaagtttgggagaatgttggactggggaacgttcgaggccgagatcagctcaacgaagctctcagcacgaaacctttctcagattatccatcttacatgaattcaatcgataacgaagcgatcgcgaactggcgcgctactggcaagctcagtggttggtacgaaatccacgccagaagaggtgagtgccagggcgatgctcttggccgcaaagaatagggagggcgcgtacgcgagggcggtgctgggtctggataagctgcgaggcgagcagcttacgagccacaacaactataagatatacgagaagtattacttaggtaggttgaaccattcatcacttgcaactactaggacggagtttctctgaacaatggcacattgctccagtcagaggcggctccagcacagctgggctccaggagatagagagaagttagttcctattcgggctccaggtaacaactcacaatgcagacagcgtaggcacaccagcaatgttgcaggaccaacacaccaagctcaagcaacttcaaaacgctgaccgttatgtagcaggatgtcaatgcctcaaactttttctaaggccacctcacacagttcttcgaactactaatacgtagtaagaattaatagcggggtacgtgcaggtacttagttgtcgatagagaagtccgaatttcaaggcaacggcaaaaaatatctatttggtggcctcttaaacaatcaaatatttttggaaaagtacatgtgactatagaaatgtcaatagctcacaagtaaagctaccgaattcttgattgccagcattcaccgtggtttgtttctttttttaccgccagcttatctcttcttcgccacagccaacgcggccttgtagtacttttcgtaaaacggatagttcgcgtgcttcttgagcgctcttccggtcagtccgcccagccccagagccaacttggcgtacccgtcgtctctattcgtagccgccagaaccattgatctcgctgctaactccccggccgttgcatcggcactaaccagaggaccttggccagtcgctttccacttggtaaccgcagcatcgtcaaataccttcaggtacgacacgtagtttttaaacgcttcggtcttcatgactttcagtagctggtcttcggtggttttacccagccccaccttagcccaggcttcgaacgaagtgacatgttgcttcagccacgcgttccagacagcggaaccgtcccacatgatgtacttgtagttcttgtgcggcttgagggccttctccgagagccccaacagctttttcacgatatcgtcagacgcctccgatagctgtccccccttcagtgaagcaacgttgcgcactgtcgactcgagggatgccagattgccaccagctctgtcttcatcgtctggactaaccggtgagttaacccgcagagacctacccgaagagactggggcttttgccgccgagagggaagcagagctggcgaggaaagcgactagcgccaccagtgtagcttgatagaaacgcatggcgtttggcgaagagcagtccgtcgtccgaggtgaattccaaagtgaggattagaactccgctcatcatgagcctcatgccatccagcccatccaagcggatcgatggataggacatttttcacgcacttgaatgcgagaacgcgttaaaagcactacaaactgcagaatattaatatcaccatatttatgttttcatgccctggatgccaggaaaacacactaagatgttgtggcgtaatcgtgcgctgctcagtatgtgtctgctatgtaatgtaatgtaatgtattacgttttcgcgttgccacactatgctgtcgctaggctcagctttgctagtcgacggcataaggtggtgtccgcatacgtcgggtccttcttcgccggcagtgcggcgacagttgccctctcgagggctttccatttaggtatctcttgtgcgagcagccgaagttggtccaggtcacggcgggtctcgaggcgataggcgtatccgctcgagataaggaccgcatcgagcacagtcggtagtgtcgtgcgtgggcgttcacgccaggttcccttggacgacgagtcgaagtaggcggccatctgggtgtacgctgggatctcgggccggcgcaggatgtggccgaacagacgccatcgtgctgctgtgattctgtggcggagcgggcgttcttgacagatttcgtagagcgtggcgttagagattcgctgagggtagcgaatgtttagtacgctacgtagttgtcggcggtgaaagctttcgagtccgctcagctcggacggcgtcagtccccacgttccgctgttgtacagcagaacaggaagcacatagcagttatacagccggactctggtggcgtcactgacgtactggggccggatccatattgtccagagccgacgtagcgcgcctgctgcgagtattttgcgtcgtgtcagattttctgagtcgccgagtagactgctaagcttctgtgtggagcgccacgcctcttctgtcccccgagcgtgtcgggagtagcccgacgagcctgtacatcgctgaatcatggttagttctgtcgcagttgcattcatctggagggaccagcgtgcgaacactgctggtgcttcggcttggatgcgctggaccagctcggtatcgcggcagacaaagtctgcatcatcagcatagacgataatttggtcgagtagggtccgattcactccgaggtggggtgcgaggtcgcgtaacgcagcttccaggtagatgacgaacaggaccggtgaaagcgcatcgccctgcggcgttccgatgttgctatcgaagctgtgttgtgccttggacccggagcgcagagagagcttggtgtcggcgagcaaaaccttgatcaatcggacctcgtcgtcgtgtaagaatgtctggagtacttctacaagctttacgcggtcgattgtgtcgaacgctcgcgagaggtcgatgccgaggacatgtatggtttcacgatagcgttgcacgcgggcacagagccatttgtgcgcccacacggcgtcagcagtgcttctgtgtttgcggaatccgctttgattgggggacaggaatgtgtccaccgcagcggatatccgtgcgagtacgacgagagataaggccttgcgaatgctgcttaacagcaagatggagcggagactggaacatatacctcggggcttgttgggcttgggcaggcacacgagtgttccttcaccgagtgcgaggggggtgccttgctcgaagctgcagttgacgaggtctgcgaagagaggcgcgaggactgaagccccgtacttaagaagttctgctgggagctcatctggcccagcagcgcgtccgttgttgaggcgccgaaaggctgcttcgacttctgttgctgtaacaggacgggttagagatcgcggttcacgatccggaacaggatgtggccgccccgggtcataaaacagcgttcggaagtgatctgtgatcaccttgttagtagtttgttgccgcaggatatacttaccttcttggtcgtggagtaacagcggttggggtcgatgggggctaatgtctcgaactgctgcatacattcgtgccgagtcgctcagattttcgatgcgtgtaatccgctcgtccagtttgcgagatgcgatggctcagcatcgcgctcggatttgatggaggatcttgttgcgggcggctcggagctcgatcgtgttagcggcgcagtcgttgtagattcgaagctgaagcgcccgctgggcctcagagagcagccgaagttcatcgtcgtgatgtcgtacgtggcggtggttaggacctgcgagtcctatagtcccctcggctgcttctcggattcgatcgagcgtgtctgtccagcgctggagaacggtgctgccttgtgctgttggctgtgaaagcgctgcctggagcgcgttcgtgtagtcgtctcgtgctgtgtcgtcgtagatgagatgatctcgtgctaacttgagtgctggatctggcttgaccgcgctgtagtggtgacggtgagtggccgcgttcaggatgatgtcggcggtgacgagcttgtggtccgacgccgtcaacgttccacgccaggatcgtgcgtccatgcagagccgtcggtagttctgagggcataggatatagtcgatctggttgtaaatacagtgattcgtccggcgctgactccatgttgttttgtggcgggctcgcttttgaaaacctgtgttagtggcaaagagaaggtgagtagaacagaagtcagctaatgcgtggccgtttcggttgcgtatgcctcgtgcatgtggtcccatgaatgcctctccgttgatctgttgtccgagcttggcgttaaagtcgccggtcacgaacgcgatgttgcgccttggtagttggtcaagtgtgtcgctgagatcagcgtagaatcgatctacttcggcgagaggccgaccgctgtggggagcatacgccgtgacgatgttcacggggcctgcgtgggggagtaagagctgaacgacgccgattcgatcgcagtgtgcccaatagcagcgtaagtaggggcggacgtggggggagatggcaaagccgatcccgtggcgctcctgtacggctggtagtgtgagtagcgtgtagtctccgatacgtttcttgtcgagggtgcagatgcgtgtttcttggatgccgagaacgtcgatgcggtagcgccggaggtcctgggggagcgtgtcctgctgcttgcgggtcgaacctaacgactggacattaaacgaacctatcctaaaacggttagtttgatgcgcgcggcgaggagagcgcgataagagggtgggaggtgtagttgtcgctagtgctgtcggcttgggggcgaaggaaagacccgctagggacgtacagatgcccgagagcacgtgccagaagcgcgtagctagcatcatgctggccacgcgttccgggggagggcgtcaccccaaccccaaccaaaaagtgtctgctatgcacaacaaaatgacgagcttgcacatgaaccagtttcgttcaatgggtttgctgcgatcagtccatttctgccagcacctcggtcggcttaattatgccggttgatggcgtaattgtgccggttggatgtagtgcaattacgctggaggcataattacctaagaatgcacttctatagtggtgcacgatggctgtgaccttcgcagcccaaccagctaggcgactaaaccggagacagcacactatcttaccgtggccacgcagacgttgtggtaagcagccaatcttactagtacacgcgcacacggccctcgatcggcccaggtccatagatcttagcataggatgtaccgacaccataatatgaatgcaaagctactgaaggtgtgtttttatcttaagctacgcgttaagttggacaacctgacaggtgactgtagtgaatcacagtgctgtaaaggctagctcagttttggcggtggtagcatacgctgggagcagtgttgtactagttagcacacgcaggatgcgcgaagttcattgtcgttgttgcattaaagtaacaggcctatcatgataaagctaaattggaaaagtccatagactccattatcctaccatgagggctagctcctgtttggggtgttttaatatccattgcccattactacgcagaatatatttcaggtgcgattgtttcaaggcttgcacggcatggatgtcacaatagcgtcgtcacgctatgggtatggtagcactagagcagagggtagtagtagctgaagcactcgggcaagatgccgtcgacgttgcagtcagcactagttgttcttgaacaggtaaattgagatctgattgaattagacgtgtttccctaactagttttcttctagctagcctacacaactcactcagtaactcttcgtacaaacatgcaatgttaacatgcaggatggcatcctcaacttgcacttgaacgtcaactcacaaagccgaaagtagatcacagctgacgaactctacccgctactaattgccgtgttcaacttgatagccttcgcgttcaagctaggatgagtaggatctgctagcagtccttgatgataccatgacattccctcccctcagcgtggacctcccctgcgttcgtggtagcgttggatgaggccacggatcgaggtcaagttttgctcgggttcccatgttgtccgtgcttgtccaagccatttcacttcatacagtgttcggttgcgggagcgcttgtgattcaaaacatattccacgagttcaccttcagcaccatcggaaagtcggactttgaacagtttttggttggggcgtcgatactccacggaaatgtatggtttcagcaagctcgtgtggaatacggggtgtatgcacactcctgggggcaacttcagctggtagtagctgcggccgatacattttgtaattgaaaatggccccacccatctggctccaagcttcttttttgttgttcccaaatgtcgagccgagagatgttcacccgataacatgacctcttcgcctttcttaaacgtttgttgtctccgattcctgttgtagtgctcagccatgcggtcctgggcttctgcaatgcagcggcgagccttagccagaatatcggactgagacacgatgaactcagagtgtttgattcgcttcagcgcttggtctgatgctggtacatgaagcgtagcaggcgtccggggtatatacccaatatcggcctcaaatggcggcatttggattgacgcttggtagcgggcattgtatgcaaactctgctaagctcaggtgtcggtcccagtcatccgagtctgcattcgaaaatgcgcgcaagtaattctccagtgtttggtttaggcgctccgtaatgccatcaccttgtggtcgaaacgcggtagtcatcttttgctctacacctagcaaggcgcacatttgtttccagaaagctgcagtaaacttagagtcgcggtccgaaagcaccacgtttggaagtccatgtaggcgaaaaatctctcgatggtatcgctctgcatcatcctcagccttgtcagtcaccttcctcgccccaaaatgcgcgcgcttggtaagttggtcaatcactatcatcacaatgtcaaaacctcgaggtgtcatcggtaagcaggtgataaagtccattgcaacatggctccatcgtcgaagtggaatcgcatggctattcaaatgcccagggggggggggttccgttcgagccttagtccgcatgtacacttcgcagcctttcacatacttcgtgatatcacgcaccatacgaggccaatagtagcgcccctccactaagcgacaagtccgatcaattcctggacgtccatacacaggactgtcgtgaaattggccaatgacactctcgagcagctccttgcagcgaggtagcacgaggcgtggctcagtgtgatgaccagcctgatagtacagtcgtccttcgctcagcgagtaccgctcaaggttccgaggcaaggtctcgccatcgtcttccaaagcaacagcgtcctcggcctgagatgtatccaatagtcgaagtaaagttgcagtagttgtgtcctcattgtatctcgccatggcttctttcacagtagccgacagagaggtctccatacgccggcttaattgcttccgagtcgagattgtagcgagcgtgacaggcttggtgtctgcgtgaaagtcggggcgacgagaaatgccgtcggctacgtcgttcgtagagcctttgatgtatctgatctcaaactggtactcagctagctcgtcataccaccgggcaatacgacgcgagatcgacttctgtttgaacacagtttccaagctcttatggtctgtttcgacgataaaaggtctgtccagcaaataaacacgccactgccgaagtccaaacaaaatagccaaaagctccttctctcgaatcgaataattcaactcggcagccttgtacttgcgaccgccaaatgcaatcggtcgttcaatttcaacaccgtcacggacctctttctggaagattactcctcccattgcaaaatccgaagcgtccatccgtaagaaaaaatctttgtcgaaatctggtaaggccaacactggtgtctggtcgaccttctcttttagcctctcaaaatggcgttcgagcacaggtgtccacgtcagtgtcgagcttcgtgtctttaacatctcaaacagtggtccggcatcgtcagcgaagttcttgcagaacctttggacgtaggtgacggtgcccaagaaggactgcatctcctgttttttcgctggccgtggccactcttggatcacccggaccttgtcaggattaatttgaactccgtctcgtccaacaatgtcccccaaccaaggaatagctgcttcgcagaagacgcactggctaagcttcacgaaaaacttcttctcgtacagtctagcaaacacacgatccagtgcatcgaggtgctcctgcatactggtgctccgagtgaaagcatagatgtcgtcgaagtaactttggcaaatgtcggtcaggtcgctcagaactctgcgaatcctatcattgaaagtggctggtgcatttgacaaccccatcggcacaactatactcgtagagaccatcaggtgcctggaaggctgtaaacggaatatctgcctctctcatccgaaattgatagtatccactcagtaagtcgaggcacgagtagtagtacgctccttgcatcgtctccaggattttgtccttgcgaggcataggcatggtgcgtcgtacagtgttgaggttcattgctctgaagtcatgcacgatgcgccagccatccggcttccgtacgcaaaacgttggggctccatgcggcgaagtcgaccgccgaatgtaacccacagcctccatctctctcacccatcgcgtaatttccgcttcctgaaccggagactgcctccactgttggcggaaaatcggatcattgctcttaacgtccatgcgatgtagcccatgctctacaggtggcaggtttgggggcagcttctgccggaatagccccggatatttgcgcaggtacgggtagacgggatggttcttataatcttcgatgtcggtcgctctggtagcaggttttactccgccgggctggattacgaacacgtactcgattgttttgtccttcatgatcatgcgacgaaactgtttcgttgaaatcaatcgggtttcccctgtctccatcgagaagtacgaggccgatgccccattagtccgagccgacgcttttcctttacgtcgatttgtctttgaagctagtacagttcggagacgctgctgcagacaatctcggcttggccgaatttcaccagtgacccagtcaatctgagggttcaccgacttcaaccatggcataccaagcagcaaatctcgattggcgggtacaggtaacacaagaaactctgctgttgaatactccaagccatcgatccgaaccgacaattcaatcgttttcttctgcaccgtttccgtcttatcatttgccatcgtcaagctgagcgaagcatcatgttcatgaacaagatcttcaagtgagtgatcttcgagaaacgatgggctcaccacattaatcgacgctccactatcgataaaaccactcgccatctcagagtccacttcaaactgcaccgcacattgcatcttgataaacggctcggatgatccaccgtccacttgaatgcaaatgcgttcctcctccactatcacgtgtttgtcccgttcaatgggcttaggacatgatctggtcaatcgcccgtcatcgaccagagttactcgtttaaaggagttgcatcgttggttgcatcgtcgacgatcagcttgtcgaccaaggcgaagtacttagctttatagtttgttttgtcctgagtggtgggcttgcggaacgcaggttggctcgtcgggcgcttttcgggatacttcgtccagcagttgtcgggattgtggaaccctttatcgcagtgaggacacttcttcttcccagcagaggtgttgttgctcatagttgacgtagacgcagaactgttcttagtcgcagccctacctcgggcgtgtcccccatgcgggtccttcacgttggtcggccctggcttactctcttctagtcgttccaactcaacttcgctgaatccctccgcgatcacatcctccagggtctcaggtttctttcgcaggatctgcttccgcaaattgttgctggtgagtccttttaggaagatttccttggcgaacacaggatccagtggaactagacggagtttttcctggaactttgccacgtagccctgataggacccacgttgcttgaaattcagaagctcgttcctcaacttctgctgaaagttgggttctttgaagttcttctccatggacgccttcatagcgctccacgtattcatagtcatcgggttcatcacgtacgtctcgtaccaagtggccgcattcttgcgaacgcactgaccgagctcgcgaccgacgacggcgtcatcggtgacaaggtcgtagcccttgaatgagaagtaggactcaaactggaagatgaaactgttgagcttcactcgttgatgtcaccctcgaacgttggtggcttcgtctccatcttacggagctggcgtgaagcagacgcggccatctcgacgtcatattgttgtctgcgaggtgcgctctgtggctgcacggcaggcggttgctgttgcatactagcaacagcggcagcggtctgttgagccagatcatgcacttggccaacagcaccgatgtgggtttgcagttccgtgatagctgcaactgtctgcgacaccgcttcttgtgcttgactaacggcggcagtattttctccagtcgactgctgtgttgttgcaacagtctgcactaacgcgtcgatgccttcgaggatctggtctaagcggtggttaacttggccaatccgttcacttatctcagcaattgtcgcttcaacactctcaatgcgctcactggttcggtccactggaccattctcgagcgcgagttgacgggcggcagcttgacgacgcgtctccattggcgttggactgcaaattctacaatgtcacaatagcgtcgtcacgctatgggtatggtagcactagagcagagggtagtagtagctgaagcactcgggcaagatgccgtcgacgttgcagtcagcactagttgttcttgaacaggtaaattgagatctgattgaattagacgtgtttccctaactagttttcttctagctagcctacacaactcactcagtaactcttcgtacaaacatgcaatgttaacatgcaggatggcatcctcaacttgcacttgaacgtcaactcacaaagccgaaagtagatcacagctgacgaactctacccgctatgttcaacttgatagccttcgcgttcaagctaggatgagtaggatctgctagcagtccttgatgataccatgacaatggagtccatcatgattcaatattatacaattatacaagtgacgtcgcacgagggcatatcagcacgtagcctagcttaaaaatacatacttgccacataaatgtacaagatatcctggcccatgtagattctcgttcacttggtggagagcaagtttatcagctgcgtgctcactaattatatgattccgagtaatgtacatgaataagtagcatactgccttcatctagttctcacacagcctcaatacattgtcaagattgtaaactcactagtgcgctatgatatcacactgcgattgagtatgtgtcactcgactgttgcatacacgttatatttctgtgctcgcctacatcgaagcatctaatgccaaacgccaccggaaaagaaaaaaagtctgcgatgtctacgtgcgaaatactgatgccaccactggtggctcactaggttttctacgtactaagcatcattaatacgttagtttcgagagtaggtagctaactaaaccgctacaaattcaaattcaaattcaaaagcaatgctaacactgcgcagtataccatgcgcaccgtactgcggcatggcgccgcattgtgtttaggtacgtgtttctgcctttagcggtacatgtagcctggtgttgccaaatgcactatccgtgtatgtgtgctatatccagatgtactgtagtgtgttattcagggatggaacgtcatttttcatacatattttctccttgactgtgaatgcttgccatgatttcaacggagagactggcttgtgcatgctgttctgaccgacattttgccaagatgattacaatttgtcataagttacttccagtcgcgtcggtgcatttcaggcaacacggcagtcaagagaatcgagagacctcgaaagcatcgaaagcgcgtattaataagcgcctccacactattatattgtatgcagtgttataaaagttctgcctgtagtataaattatactgtactgccggctgtacagcacgtatgtgtagatgctggttgcttacaatcttcccgggtgtggccatgttctgggcattgtccgtgcgcggcaagctttgcttgttgccgatggagcgcctgctgttcctacagaacgatgggtccgcgcctatggatacatgtacagcttgagcttcaacctcgacgacgagatgtatgaagccgacgacggcaaggcgtatgtaccgcaaacatttcatttcatgtttgtctgtacctacacggcatctacaccatttccctagcaatgtgaaaatggctcgtccctggctagctctaattccatgctgtgtggcgccacacaatttttaatttcatgctatgaaaacggcatttttcccaagacttgcaaatctgcccatcacccgtcccaagcaaagtgaacagactggtaaaatgcatatgacctcagatgttgcatacgccctcctactgcagcagcacggtcgtggacagcaaggcaccggagggtgtgccgtccatggtggcggcgactgccagcgtcttctccagcggcgcgtccggagcggcgtgcaccagcacgtgggctcttgagtctctggtgttttctgcagtgaaggctacctctacgattctataggctggtcttgggaataagttttcccacaactccgtgtttggtcgcaaaaggttgaaaatgtcaaaagtttccccagcactccgtattttgggaattacccccattttcacattgcttgagaaacttttcaactagcctgggaaatggtgtagagatgtaccggcatccacccgtcatgggagatgtctactgtatggtatgtattgattaaaaactatccagatgcgtatccacgtcatcttcgctcacggcgctgccaaaacttcgcctgagaatctgccatgagatactggcatgagtcttggcccatgactcatggcagccatgacatagctgtattacatggagcagactcaactgcggtgaggtgcggtagcgcccagcgttaaatacgacacgacatctactgtaccagaatcatagaggcctcgcccgttcgtgcacgagtacataataaagagtggtccacgcttctacgatataaaccatggatgctgccgactcattactgactaggggatactcgatcgtacagtgcgcgccaaatcattaggacccttgatttggcgacacacttttgccgatatctcggcttgtaggaggagttaccagttactgtttagatatgttgctggtacatgctatactaagaagcagtatgtgttaacaactgcaatttccaagtccttagaagggctggcatacaaactgccaatttggctccagcgacacaaattagtaccagaccctttttctgacaaaatgacacagttttatgcaatcccatacaaacttctatattaaagttagtacttagtgaggccgcccttctgcttaatgacagcaaggcagcggcgaggcatggactccacgagcttgcacaggtactcctgctcgatggaggcccacgctgtcatgattgcttcttcgagatcacccacggtacgatactggcggccatgggcgtaaacccgagccgccataaccgaccagacgttctcaattgggttacagtcgggggaacgggcaggccaagccatggtgttgacttccatttcctgcaataaactcgtcgtctcacgcaaggcatgaatcgacgcgttatcttgctggaatacgaagtcgacaccatggttagagtgagcgaacggtagcatatactcagacacagtataaatgtaatggctcgagtttcggtgaccccgcaatctcgccaggtcactcttaccttgagcactgaatgccccccagaccataacgcttcctccgccgttctggcgaagcacgaaggactgcgcgggctgcctcatgacgcgccggtagtacttgaatccgtccgggtcgtccaggttaaacttttttcatctgaaatacagtatatttccaaattccttcacatataacaaccgttagcatcccgaagcaaaagataaaacaatttagagactgtacctgggttaagtatatgctcctccgcccattccatccgcgctgccttgtgagccgcagtgaggggcagcgtgcggtccatcttggtgtacaccagatggtctacacgctgcagcagccgttgcaccgtgcgtacggacgccttcagtccgagctccgtcttcggctccgctgcgaagcggtcgcctgtcgccgccttgcgcactagcagccggacctccctctcggtgagtgccgaccgccttcctggtcttggggagggtttggcgctgtcttggagcagccctcgctctgccttgataaccttacgcacacaggtacgtactcggccagtccttcgtgcgatctcgtgtagagagacgccgccgtcgtgaagcccgatgatccaccagtactcctggttgctgagggctttgccgcggcccctgcaagaagcaaaatgaaaggcacacaggggcgctagccaccgcagcaacctgcctggcagcacgtttcctctgtggtgtagcgggatcggccaaaatctggttaaggcctgatcgagcttcccaccagcgcccaggcaccgactaccggagggggtcccccaacgatccgtgatcggctgaacttgttctcaccttgtgtacccgtcggcgggctggatctgctctctcggggctccgaagatgcagcacttggtgaagatcgagtgtcttggcgtgacgcggggatagtttgtggagcagcgcggtagtcttcgctctgcgtccgagtatacgctccgatcgagggttcttcgcttcgatcggtcggcctggagtagatccaaggcctgtagttgcctttccgggtgtgctccttcctttcctgagttgcttgccgcttcctatagcgggatcgagatcgattgagagacgcagcgatcgccggccaagccgtatgcggtcgatcgaggacttgcacacgagaggaagatcactagagtaggtcaagatggctaatgtattaatccagtcttaaccgtaccgctagttcactacccgaagtgtcaacgcttgccgaggccaatgtagctcctgggacttgacgacttgagggcacttgtggtcttctgtgcaaattgcgttctgatttatatttagctggtctctctctaccactgccatctcatctaccatcctacaaccaaacaattactggattcttgcgctggcttcgcccccatgtgcttcccatccgggtcgatcggcgatccacgatcggctcccaatccacgatcgacgccgatcggcgatccacgatcgatcccgatcggcgatcggctcccagtccacgttcgaccccgatcggcgatccacgatcgcctcctgatccacgatcgatcccgatcggcgatcggcgatcaactcccgatcgatgacctgtgcgaattgccgtgcgctgccgatccgtcctcttctgtcctcggccgccctagatctgcgagattggtcgtcgatccgggcttgggtctacgtcgaatcacgccgcagtccaagcgcgatcgcccgtaatctgtcttgacatatgtgttgccttacgcgtcgacgttatccaatcgcttgagatctctcgatagaccctcttgatccgcgaccgcagcctgatccctgcctatcgttctgccaccatgtcgcttgatgtcatcgcagttggaaattcttgttcggtgcttcaccacacctccattcatctaacgtcaagtgaccttcattcttttaatatagaagtttgtatgggactactcctgcccaatgcttggttgtccgaattggattcgcctctcatcatcttggaatccggcgctcaaagtttgaatgaggaaggaaaggccagtctgcgatctttcggaagttgcgtcgtaacattgtagtaatcgggcaaactttgctcttgttcgcaattgccaacgaatttcttgaatcactgttcatcacctccagcgagatgacctcgctcattatcgtgtagtgcaacgcccaataggttcgttcagctagctcgaattcacacaagcataaatgatttgaaaaggatcttcgcggtttgaagtatgactgtcttacacattgaagatgttatggtccttgggtgctctttttgggaagaaatgaagcacatacggttgctcttccgctccccaacaccggttcatttgtaagaagcaacttgacaggccgtgtattctgcattttgccaatcaaattgtggctacttgtgtgatttctttcaagaaagaattgccattatttaaaaattactcagatcaccgcccgtatttacttgagattaagcccaccagtaaatgcgggagaaacccgccttcaatctggaacatgactcgatccctcaagttacttcttacggatggacgggtgttggggagtgtctcgagcgaaatcaccgactttgctgcatttcttcgccaaaaagagcatccactgcgtaattattgtggtggcatctaagcacctatgtgcattagctagaatatattcgtgtcattcatcactttttttgtattgtagtcacttcgatctctaacgacttttaatacaaagatcattcatcacttgcaaatacaattctctgcatgatgccaggggtcactcttcacaatacagaaagcgtaccgcacttcagggcacaccggcaatgttgtaagatgtcaataccgccaaacatgcctagcttcggagttaatgtatttcatcattgttgtcggctgatgcctttatttacgtcacgatatgcaaattataaattgtgcgttgcagtaattttgccgacggttttagaactctattatggcaagctgtttctgtaaatatgtgttgtagaaaagccgcatcgaggtaatctgagcgctaaatcgtccagttttagaaagccaaccgcccactcgtgcggctgcgtggagcgaaggcttgcacaacggaccgagcgacgaacgagaccccgtgtgcctacaaggaggtaacgagcgagaagacccacggacctggaccaagacgacggacaagaagccgcgctcacctgtaccgagacgactgccacaaagtcttgtgcgcgggcaaggagacaacgagcgagaagcccttcgtgtctgcacggagacgacgtacgtgctcgcctgcactggagcgactactgcagagccctcacacctgcactgagactttgtcagctcgtggtgcacgcatacaacaagatctgcgctcacattacttgacggggcctgcaagtttacacagagcgcaatcatcacttcctggggtaagttgccgtcaccaagtgtagttgcgccgagtatttactgacactattttgatgccataggtggtgttcgaccgtgcgctgcgccttctcactgaccaagtaagtacctcgattggtgtgaacgttgactaacgctctacaattgctcgtcattcttatatcaacgctatgctgtctttcatagagttcgggagacaggcatatcagcaaaggtgcattagacaagcaatgtgattgatcggaacaaggtagtatgctacgtggaataattctattgctttcatagactagttgtgagggctattggtgagcagggcgtttgtgccgtagggcatctgaagctaaggcaaaggtaatggatgcttttacagctattatttgctttaaaaaatcggtgtatttgaagtactgttttaactactttggttgtttgatgggactattagaatacgagcgcgatgactgacgatgctgtgagagaagacacgcgggagctactctcgccaaacactttacgtggcttgctcatggtctccgaagctctgctccacgcaacagaaagcagtgcactctggcttttattccaatcgaaggttttgacgtgttgaaggccacggtgatgcagcaattaagtagcgatgagaagtggcgtggcgctaagatcacagaaaatggggcgatctttttcaagcaaaccaattcagctagacaagttgattaccaggcgctaagctctcataaattttgggagctccttcactctcgatgggcgtgtgtggtagaatccgaaaaggacaaactagcgttggaagcatcggttcagtgccgaccaacagtgggggtcttcgactttgaggtcttcgtctacttagatcccccaagaaacagaagccgacgatgtacagagcgactgcatctcgtatggcacgtgcggtacaagaggtcgctgcaatgcaagaagagcagggggttacgcttagcccgatcactgcgcatcatgttgcagtccaccacgctcgtcagccagatgacgtccctctctcaattccaaccgacaataccaccaggcaagcacaagcgttagacgccgaaatggctcgtcttgatgagcagcaaggccaggatgctagggatgatgactatgccgagatcgaagtgcaactaatttggtcatgggtgaaagttcctgtacgcattttttcaattcgagcagcacttcgactccccaaccacgatatattttcaagtggagtatttcatttccactatcgcccacggctgggggccacaattcattcgtgttcgacttcgttaaggcgctccgggccggtgcggcctggagcagtcccagggtgaggtgcggtggggcaactgctggcttgtaggtaaaactacgaatgacttgctagactacttctactacctccgggtactgggattgaatccatgcgatgcgccagcgcatttgggatgtagccacttggtgcgatgcagcacagaccgatctgagcagcgtccttggaccacaatagccttcccgctcagcgaaaaactggtctccgcccacaacaaggggcggaaaccttaatttccactatcgctcacggctggggccacaattcattcgtgttcgacttcgttaaggcgctccgggccggtgccgtctggagcagtcccccccccgtatgttggcgaagccgcgcttgacgaaggctggggcccgatgagatgtgggagacgatgttggctgcaaggccagtgagagtgtgcccgtcgatgcgagtgtaccgctcgtacgcatcggatttccaccgcccgaatctctttatggccaagcggtcaatcccggtcgtgaaaagagaggtcgcacccccacttcgcatcgagtgagtgccgtaccggtcaggatcttcaccggttgactttgctgcatgtttgatcgccaccgtcatgtccttggccgtaataaactcgccttgtgtcatgctgcatattggttcttctctggagacgccgatacgttgttgatgctgacttaggagccacgcggcgcgaacgggacatgcccacctgagtccagagcgctcgaggatactggtttcgccccgcccgcactggtccgttttgctgccacggaaaaatactcgaaccgatgtcgcttcagcttcatgttgagcttgttttccgtcttgagtgatgcatgtcacgtccgcgtatcgtaggatgtacggcttcacttgacctcggtccgccaggtattcgctgcggcgcaacataaagaagtagcccatgagagcagccccccacaggacgcactcacgggcattgttgaagttgcggtcctggcggagttgtcggaggatgcgtggggtaacaggttctttttgggttggaggtggtgacagccgtagcatcccttgcacagcgagctggtgccccgcgtggagcccaaccttgagtcctcggtatcggcgatgataccatgatacttggctgagtttggacaacagcatttccgggtttgttgtcgtgtgggagccaccgggaaacagcaaatagcgccaattgtcgagagtctgcttcgttttcacctgccagccacggggaaaagccttgtgtgttgcaccagctgcttcactctgtccacgttccggcatacttgcggtggctgtcatctgcaagtgatcgggcctgtaggtcgtcgagaacgttttgtagatgtgtcgtacttgatccggaacgctgtcctgtgtccacgaagaagttgcgttagtccatattctcgcgtgggatgctgtccgcgcccgtgacccggcatcggcaaggaggttgcagtcaccaggcaagtgttcagctgaaatacgtagtccgagggttgcttctgcgaacccgatagcacggttcagctcttgggcgaaatggtttgagctgtacaggttgttggtacaggctgctgcactggtattgtccgtccagcagcgcacgtgaagtaaatgtacaccgtctttcttccattggtgaccccagatccatgttgcgagcgccacgcagaattgttctcggacatttatgttgaacccatttgatccggaggtctgctcgattagctggtgctcgtgctcgtcatacagcaactggataaccgtcgtcgagcggggtcgagaactgcgaggccctggttgctggcgtccatgtacaaatggacatcgatggcgggttcggcgcaaaacattgatgtcggcagggaccaccagcgcccgtgcgtgaggatgacgtcgcaccattccaagtcttgccgtgtcgactcgtcaatcacaatgctcccccatcgtgacactttgttgatagaccgttggaggcgctggtagaagggttttgcactcctaagacacgtagtgacgtggcgaaggctccccaatagaccctgcatctcgtgctttgacagttttttcttctgggctgtctttcgaacgcggtcttgggctttcaagagctttgcctgtggcatcgagactgtgcgctggatggtatcgagctccaacccgagaacttctatcttcgtgctccactccgaaaattttccttcattgatggctcgtggaccaagtactgcagtcatagcgattcgtaaggctgagcttgctgctttgaggcgaccaggagtttcgggctctactagaatgtggtcgtcgacccattcgtttgcgaagaatggggtcggatctgctggatgtgctgccatcgtagcaggactctcgcgtccaagcagccatgatatcgctccgccgaacatcccgtaaaaggctggagatcccgtccatccgaatggggccgacatgtcgatgatgatagcgcccagttgtgcaatgcgtgctcccatccaatggacactgcgtgcgatcaacatgatgtgccggaacgatcccttcacgtcgcctttcattacgtagatggtgatcattgggttctgcgcgtagcactcctcaattcttctcgcgactgccgccacgtgccggtaccgcacctctgggaacgagcttttgtccgatgcatcgttggttgagttgccaatggggtacgacaggtcatgaattaggcgagtttcgagctgggggtccgtgtttgctttcgggactgcaccgagcgggctgattcgaatgttgccgagtgtttcgaacacgtttgcgtccagtaccaaatactgtcctccgtcttggccttcgcggacgcttttcaccactgtattaaggtggcgatcggcagacttgtgatttgttggaatgcgctgctgctcctgctgctcttgattttgcgtggaccattgaggatcgatgccaaaccgtgctgcgctgcatagtgagtcgcggtgctcgaatccctccagtagtcgatgaagacggttcggggatagcgctttgttcgggcgggggtcctctggagactggcctcttgcgagctcgacgacttgttcaagtgtgaactgactttgggatatgaggcgggagaacgcatgctgctttttgtagtctaggcaagtctaggcagtatcgagggaccttgccagtgtgatcagaggtcttcggcgccgcgcttggcactgcgattcctcctctccgtagcacggacgtcgcgtttggtttcatctgcctgcagctggtgctccagaatggcctggaccttgacgcaaaggcatcgaagactgacatgggctggccggttgtccgaagccttgatggtgtggacactcgagcgccaatgctctgggaggttaccgcgtttagtccgttcgatagatagcggtttgcagctctctctcgccggactgtgggcgctcagcttctgcttcgtgatgcctggggccttggcagcgcagtgttcatggctgctggcatagtcaggtggaacggcgcttgaataggagtacatcccgtcgttgatggttgcgttgctgtcatacgcagtcgcccttaagccacggaggcttgcgtccgtggcggtgggcggatcgctgggtcttagctctcgcgcgaagtcaggaggtttttcctttatcctgggcgttctgcaggtgcagttggactgttgcgctttgtgtatgagtagacacgaggactgtcctagttgtgagcgatcatcacaacccggacgccatcagctggactgcgagaacttgtcgctgatcccgcccagttttgtgttgatgtagtctcgcacgatggagtcaattgtcgctggttcaaagtgtaccaagttggggaacttgcacactgttgggtccgccgatgcacaccctcgcttcgagagaaagcaaaggcacacttcttttccgtccttgcgtggtagcgctgcgacgactgcctgggggaccttgcgctccgacggctgcttgacgtgtcggaccttcccttcttgcggtcgccgccgagaatcttcgcgtgtagacgtgctctgtggtcggtttgaccgttctgacagtgcggttattaacagggcctgaaggtctggtaaaccacccggttgcctcaaaacgggaattgccgcctgagagtgcatcctgggccgcagcatagcgatagcgttccaaggtggcgttgatccaaagtacgagagtaggaatctcctcaggcaaccagtggttccagccttctagctgcagagcaaagttgtcgagagccgccgccacccgaatcgttgtgggatcacacatctcgctgcagtacaggaggaaacctcgcgttgccgagtgcagctgtttccatgaggtcatcaccggcggccgcggaatcggtagtgtgaagtcggttgtgtccactctgccggtggctgcgttgcgaagccgatcgaggtacccgacgtgaccgaagtgacttagtgacaaccccttagaaccgagccgatgtcgtacaggcgggtcagcatccctgggtgaaaatcaaggggtagcgacgaagtagtcagatactccatgtactcctctccgctcttacctctgtgagcatccgaggtcataacttggtggactctctcttggtctgcggtggcgaagaatgcttttttgttgcgcttggctggtgctggattgatgtcactcgaagctgtgcgtactcgggtcgctggcagactctggatggactgctgccctagtgatcgctgaagtacgttcgcaggaggtgcggtctctgatctcggatgaatttaatcagttccagctcggctgcatcttcgtcggtaacgttaggctcagtggctaggttgggaactaggaggtgcggtctctgatctcggatgaattcaatcagttccagctcggctgcatcttcgtcggtaacgttaggctcagtggctaggttgggaactgccaccgtttgccgtgcgctcgagggtgcatgtcgctgagtggtccgtagtggcgttcttggcgtgtgcgtcggttgctgttgaccacgcgctctctcgacttcagcatctgactcatctccttcggatagggaggcaaggaactcacgggtagtaattgacgggtactggtcgatgtcaacgctgtctgggtttgacgtttggcccacccaggcctggaaaatgcggggttcttcggttatggacttgcctattttgcgtagcaacccgtgcggcgttggccttgcagctctttgtagagcacgtagagcagtgcgtgtcgaagcgagacgagctgttgtgcctaggagagcgcgttgacccattccacttgagccgtcgcaagccgctctacatccatgtcggatgctagctcctgcagccactctggcgctgtcggtggtgtagtcgctggtgctccgagcgtcccgagcttggccatcagacgctcatgtagctcctgaagccgagtcttcggccacgcgcgttttggccaatcttggtgcccaagggtcatcgcaagtagcgggtgcacttcgccgactagctggcgtcgtgtaacggacatggcgccttgagcagtccagatgtccagtttagatccggagtatcctcgaacttggccataccggtaacttcctccggcggaaacccacaccgcctgcctgagccatttccccagttgggatcctgtagtctcggaccgtgggaccccgcgcagctcggctacgcggcgagggaccgtcgtcgctgaggtcttcggcaagcttcaccaccaccttggccctcgctacgccaacgatagacgcataagccaaacgggtcagcgtgcctggggcatcttcggggcgtaggagtaggtatccgccgacttgaagagaaggtcgagccatgactcagggaggtgggcttgggcgggagggtcggttgtttcttggacggcaactgctggcttgtaggtaaaactacgaatgacttgctagactacttctactacctctgggtgctgggattgaatccatgcgatgcgccagcgcatttgggatgtagccacttggtgcgatgcagcacagaccgatctgagcagcgtccttggaccacaatagccttcccgctcagcgaaaaactggtctccgcccacaacaaggggcggaaaccttaatggctaccctccccagctcttggaaccaagtggagaagacgttcttgactctgatcatcttcctcccgctacacaaccgacaacttaagagggcgaacatcacttaaacaaaaagatagggtgaaaaacatgaatatattgggttcaatttagtttgtgtcttctttatcgccatcaccttcctcgtacatctgaacggtaaacttttcactacggagcgatccgtttacatatccgcaatgggcatacaagttgaggacaccaggagcttgatcttctttttgggagagttgggagcagcaggagcgcattgcaacgtccagcactcgatctggatacagtgggaacacgaggtttgcatgcttttgtatccctttcttcaaaagcccgaagcaaacctcgattgggttgagatgtggtgaatacgggggaggaaaagcagtcgtgcaccggtttgataaattgcctaaacaccagaaacagcaataaatattagtgtaagaactgtgataccactcatataatatcgctctgaagcatacctcttccaattccttgtaaagacgaatctttgcgtcgtctaatatgataattgaccttggtacaggtcacgggttgaggagaggcacaattttgatcacgaaagctcggtggaacgagtttcgtgtaaaagttcctggtgtagacgaccatgcgacgaatccttggtggtccagagccgctagtatcgagcgccgctcgcctctagcgaaaggcaaacgcacgacggctttgcggtttctcctcgaccacgtgtagtggcgatacgcgtgtctcccgtccttagacgtctcgtcgataaacaggagctgttctgggtacgagtatattgcttgaagcttggccttgtacacctcaacctctcgcggaacacactctcgagctacctttgtaagaacctttcggctcaagttcatgtcaaagttgagagccctctagtggaaacattttctaggtttggaaatgtatcagaaaagccttaagctcctccaaataaaacgttgggttctctttcacgtattgcttaacgcgcgtgatgacctctaaaggccaacgagacgttttcacgcggtcctgcttcttctcaacaacacccgtcgataggaagaggctgtatcaactgcgggcttttggtccaaatatgtagctcacgtatccgacgctgatgctgaacacgtgcatcagaaagatggcgcgccagcgaaagtgttatttctccggtcgctttcgaagtgaacgccgttggagggcagataagacgcagtctatcccgacgggagagaattataccacaatggccagaattgcactttcgaaagtgcaattctgggggtggacgattaatctgcggtgtaattcagaagtaacgcagttctatgcactcgatttattaatagcaggtacactatttaaatccggcaaatattgccaaaacgtttgcaaagcacaataccttccagtaatatttcgaatacgtaaacgaattgtcaaaatcagtgtacacccccctaaaaaatgcacgtcaacgttttcgacgtttttgacacggtttcgcgcttgaagcgggtcatcattccggtaattgagcagctcaacacccaagccaagtctacagtacctcaagccatgtccgtccgcgacgaccttgtgcagcagggcgtgcgcttcctgcagcacccgaaggtgcaggacacgccgctgtcggagcgcctgctgttcctggagaagaaggggctcacgcccaaggagatcgcggcggcgctcaagctcaacgacgagaagaacgcggcgagggcggctcaggccgtcgcctccgtggtgcgtcggccagctaataattgctcgcccccttgctatgaatgtatatgctaatagccgttgttttacgtgttgcagaccagcggcaagagcggcgagcgactgcagggccgcgtgggcgtcgtggtgggcggaaacgtggggctgggacagctcatcgccgtcaagttggccaaggagggcgccaagctcgctgttattggagccaggggcgccgatgcactgaactcgccgcagaccaagaacgtggaggctcagatccaggcgctggagggcgcgatgcccgtcaaagtgttcgagggcgagctgcagagctggggcttcgtggacaagacgtacgcagccattgccatggagttcggacgcatcgactttgtcgtgaactgcgtcccggccccaaaggacagcggcgtgaagcctaccgctctggtggatgtggacgctgccgcgtgggacgaagccatgggcgtctcggccaaggcggtgttcctgagctgcaagcgagcggtgcagcagatgctgacgcaggacaacggaacggttcgaggtcggatcgtgaacatctcgtcgctgtatggcatggtggcgcggaagggtcacttcacgttcggagtgggcaaggcggcgatcgtgcagctcacccgtcagatcgctgcggagtacgcttctagcggaattgtctgcaatgcggtggctcctggctttatcgatgactcgatcagtcgcgacgactgcctcgcgccggcttcgaacaaccggattccggctgaagagcctggcaaggcgatggacgtggccaacgccgtcaccttcctcgtgtcggacgacgcccgctatgtgcacggaatcaacctgcttgtcgacggcggctacatggcttcgtaagacccgtataaactcgcagctagagcgttaaaagctgcagaataatccatggtcgtcttgtttcctgtttgtctgtcggtctgtattatatgtgtgcacgattgaacagtgtctatcaacacggaagctggtccagttagaacttgccgcccgtaaaaacgttgatcgcgtacgagaacgcagcgaaacctgcgcagccaagacattgcgcctggaagccctgccctgctgccagcgccgcacccgtcgcgcaacccgccaccagctcgttgcccacgtcgtgacgtccgcgaatcttctccgacgcgcactcgagacccgaaaacatggctgcaccgcaacagaaaaacatcgatccagcttagcataactgcaactgcacaccttctagactacagcaacagcaactcaccggaaatgacgaggaagttgttgccccagtaacgacacttgccagctgtgactcgccaagaatttgacatctgcagcagcaaataacaacaaagtcagccccacagttcaacctccaatagagccaactccattgcaatcacgcaccgactcgcgccacggtactttgggcagctcgcgctgtccggggagcggcacgggcggcgtgatgccttcatagctgcccagcacgagtccgaacacgttgcccatgacgtagcctgcgtgtcaaaatgaataaacaacagtcagcctccaatacccaataattatgttaaattatgcactattgccctacccatggcggccgagaggaagaacttgccggcgcacgactcggtgatggggttgggctgctgccactgcaggatctgcggcgggtacgcgggcaggaacgggtggatacccaccttgtcgtgcagcaggtgcatgctcaggaagctgcgcgggaacaggaacgggttgggcggtgcatcgcggctcaggtcctccacgtgcacgcccagccgcgcgttcgtctcgtcctccgctccattggcacccgccatcgcgcacggaagtgacacgcaactcgtacatcaaataataatatactttatgtggtgcacatgaaccaatcagagccgggcgcctccacatgatgattccagattctagattccagtacatgtatgcgtgtatctgatttctagatgtgtgtacagtactcgttgaagctcctcaagctcattctgctaaacgccgccaaggacgcacgccatgatgccgctctcgacgccgctagcgagcgctgcggctggccacgaggaccatgaggcaaccgacaacccagacatctacgggaccttccacgggcgcgtggtgcccgacgtgggcgagcggccgcgcgtgcctggcaagctctggcgctcggtgggcgtggcggcggttctgctgcttctggcgagctatatgtcgatgcagggccactacgagcctgctgcgagtcaggtagaacgcgtgggcgaggcggagaaccctgtagagccggtagaacgcgtggaggaggccaccacgacgctcagtcacaaggagcagagtgatggtctctccaagctcgagagcaagttcctcaagcgtgtggacactaccgagatccgcaagtaccacagagcctacgccagcgtcccccacccggcgggcagccaccaggactacaagacggcgctgttcacggccgagcagttcgagtccttcggcatcaaggccgagatcgtagagtactatccgctgctgtcgctgcccatccaccgccgcttgagcatcctgtcgccacctgaagcggctcgtgagctgaacttgacggaggactccgtgcctggagactcgtgcaccagtaatgaggacgccctgccccccttcctggggtactcggactcgggcaatgtcacggcctcggtggtgtacgtcaactacgcgcgacccgtggactttcagtggctcaaggacaacaatgtcacattggagggcaagatcgcgctcgtacgatacggcggcaacttccgcggactcaaggtgatgctggcagagcagcacggtatggcgggcgtgctcatctactcagacccactggatgatggctacgcgcaaggaccagtgtacccggacggcccgtggcgcccggagggatcgttccagcgcggatcggtgcagtacaactcgatctccggtggtgacccgctcacgcccggctttccgtcgctgcctggtgagccgtacctgagcaaggaacagtgcaagaccatcccgcatatcccgaccctgccgctttcctacggccaagctcgatacattctcgaatctctgagcgggaagaaggctcctgaggcgtggcagggtgcgcttaaccttggcaacggggcttactttgtgggtgacgacgaagccacggtgttgaatcttgatgtcgccatggacaacagcatcggacccatttgggacgtcatcggtaccattgaaggcgcggaagaacctgatcagatggtgctgatcggcaaccaccgcgatgcttgggtgtgcggtgccgtcgatccgtcgagtgcctctgcagttatgctggagattgctcgtgggctgggtgacttgctcaaggatggctggaagcctcgccgtactctcgttattgcttcgtgggatggagaagagatgggcttgctgggaagcactgagtttgcggaggaccacgccgagttgctcaagaagcaggcggtggcgtacgtcaacgtggactacgtcgttggaccctttgtgagcacgggcggcacaccatccattgcgaaattcttgcaggatactgcccagctcattccaggcaacccgttccatggtattgaggtctcggaaagtctgtacgagcagtgggtgagtcagacggctattcggcgatcaagtctcgcagttggtgctgacgatggcactctggctccggaccatttgatccaatttttgggctctggcaccgacttcacggcgttctaccagcacctgggcatcatatctgctaacctcggctacactgtcggtagtgtaatgtacggcacgtaccacagcaccatggacagcatcccgtacatggaaaccgtaggtgatccgcactatgctacgcacaccacgatcgcgaagtggtgggggttgatcactctgcgattggtggacaacgagattgtgccgttcgacttctctacgtacggtctggtgatgaaggaagacttggctggttacgagaagatcaccgggaaaatgggccgcatcgtcgactactcggctctccacgaagcaattgagacgttcaccaccaacgctgaagttttccaggcccgagttgctgagttttccgagaaggctgccaaaaagaaagagagtcacaagagtgaggcggagcgtcacttcttgaacgagaaactcgtaagccttgagcgattcctgatttcggacgcgggattgccgcaccgaccatggtttaagcatatgatcttcggaccgggattctacgagggctacaagggagctgctttccctggtatctcggactgcatcgtgtttgaggatgacgacgcaacaatccaaacgcacgtcaacgatgtcgctgctgtcatcaacaccgcagcagcttatctgacgtccgcttaactgtgaccaaggggacaggagagtgcacccaatgtagatgcatgttgtatctaatgcacagatcaaggagacaattgcacttaaaccgaagaactcagccaggtttctccattcgtggttagtcccaagttcagatgctaattgtctctcagcaccctcaagtagtcttcgtagaacccatagttcgtgtgctgcttcaacgcatttccttccagcccacccaaccccagagccaatttcgcgtatgcgtcttcccttttgttgattcccaacgcgacagctctggccgtcaattctgcagccgtggactccggatgaaccagcggaggcttgccaccaaccttcattctcgcaattacagcgtcgtcgtatatcttcacgtaagctaagtagtctgcaaagtgtctgctatccatgacggcgtcgagctggttttcacggacattacgcatccccaacttcccccacgcatcgaatgaagtgatgtcctttttagcccagctctcaaacatggcgattttttcttgcccggtcatcttgacgtgcttgtacttcccgttcggcttgcggaccttccttgggagcgcgttcagcaccaactctttcttcaagacttcttcgggcgcgtctttcgggatcgtaagctgcactttgcctgcttttctcgaaaaaaacttgcccactttcgatggcaggttgatccaggctctctcttcgtcgtcgtttgtatcgacccgtgtgccgacccgcaacgatcttccagcgacaagttctcgaccagttattaaggtcttcttcgtctcacctgcttctgccgccgagagagtgccagcgctggcgaggtaagtgaaaaccgccacgagtatcgcttgactgaagcgcatcgagaagagcagtgcgcgcttcgagacaagttttagagtgcgaacagcgccggatccaggctgctccagggcctgctggttaggccgtcccatcattggagcggatcgtcggatggggtcaccaaggtgtccgaatgcaggcgcactggatggtcatggcctgaagctggtgtatgcagctaggatactacgcttagcttaggcattggctcgccaataaatagcttcgcgcacaaatgtctactcacgtctacgaagcgctttcccgccttgtgtagagttttcatcacgcccccgggaattagctcatgtacagttcagattcctatcctttggatgcattcatactgtacgtcgcgtctagtgcagacctcccttatacagacaacgacttacaaagccggcatgcttaatgccatcctcctatataaaaacaacgataaattccctcccgtcaaatctgtaaaactgtcataaaacacacggcgtgttgcataaagtacacaagaaagcatataaagtacacaaaaccagatggtatacaaagatgaagtcatttgattgaatctgattggctggtttgcttatgttaagctttgcttgacttcgtctgccggctttttgtgtctgccggctttgtaagtcgttgtctgtactggcacctgccgggatgtgtcggattagctatatttcggcactcttgttttgtttatttcggcacagtgccagtttaaggaaataaagtatgcaatttactacaatttctctagcatatcgaactgtttagcctggaagatgccttcaagggctagagaagtcaacgaagtgcgccggtcgttcagttcacacttcaatacggaaaaatcggattcgacggacgccgtattcgcgaatacggttgccaatccgcagcagaactggcggagatgtgaaaatgtctttggagcagcagcgttttgcactgaatcccaggcgtcgttgaagctggtctcatacgattcttcctccagggctgtgcgaaccatctcatcaagcagattggcttgacacagctctcgatgctcccgttcaacggcttcaatttttgcctcactccaaaacaaagccaattgatcgcggcgaggattcaaaatatcttctgcaaactggcggggagggactgtgacaagctcagctggcattactggcggagccggagatgcggcagcgtcattgttgctgtctcgctcagcttgtacatgctccataccttcaattagatgcagtacaaacttgccaagctgcctcagaatcgaatttttgtcggcatctgcaacactattcatgtgattcttgacgaacgtcccctggtcttgaataaactcgagcaagtgttgctctttgagccagtacttcgtagaaatcgtgtcattagcgctagattggaattcagagctaggtacgcgttcaactcgtaccagtttgcgaaggcggtctacaaggagctcaatctctgccatttgctgcgagagcaggacatccttcccctgtatcttgacaaacgtgacgttcatcaccaccgttatcccacaaacaacagctgcaatgacccaccatgatggcgctggtgccgcagacacattttcatcaaggtgttcttcgaggcgaaaatggttttttaatatccacggcaatgcgtttcccatgtacagccaccgattagttagttttttggcggcacctcccatttcagtaatcagcgttttttggcggcgaaggtgaacaattaaatcctttgtattcttcacaaagtctccattcccaacaatggcaaaaccggctttcatgaccaggtccatctgatgagcagcacaccacactctcagcaccgagtgggtggcctctttctctaaaagagtgaccacccaccatgacggcctgtcatagtgttctctccatccgatgaaataccaaccaacttctgtctccagttagcgaacaaaatatcgagtactcgaacaatcaggtgaacttggaccacagcagtgtggcggtcaaacatagggaccgcgagcaagtgtaggttgactagcacgccattgacggcaacacgaacacgctgatccatgaaagagcgatcggtgtgggttgtgatgtcgcaagcaaatgcaaacccccacatattggggtctgcgatgaggttgctgatgcgttgaaacgaataggcaactagaatacgagcataagtgcctgccatagcgtcggtcataccgtaaagcttcgagttccctgtggcgttgtagtgctgctgaattactgctgccgtctgccgaaacgacaacccaaccgagagatgtttgaccgaaagagtaaaccgcagaggcgtcttaatttccactgtgtagaccccatccactaccgagccgaaagcacgaagagccctcgcaacagtcataccatcatcttcatcttcagcattgaaaaatacctatccaatcagctcagtcacaatcaactctggaaaagaaaaccgcaacacagcactctctgtgtcaaaatgagctaccaattggttgcttcgagaagtgagatcagcaaaaaatacagccttatctgcgtccctgagacctgtgtattctccccacttagctgagtgcgcggaagtattgtgctcgatgtagttctggggtcggaaaggagccttgtagtacttgatattttgagtacgctttcgtttgcccttgggtgcttcctctctaccaaaatatcggcaaaacaggcagcggaccgagcaagccgctcccccagcgtcacacgctacgacctcgagtccgtactgcagcttgtgagcgtcttggaacggggttttacgcgaggggggcttcttagagacgcttggctttagcttctccatcgttcactgcttgaattctgcgattttgaacggtcgcttatttcggcactcgaaaaaacttcaaataggcacattgccatatataaacttcaagtgccggaataaaggaggtcttgatggggacgtaaacgacgttagcttttacctatcatatagtatatgctgtatgatagggttttggcaaattttgctattttgcaatagcaagtgtaaacgtatgctagtcataactatgcatctggcgttaaaattacgaaactcgtactagaactacatcaaaactacagctcaacttttgaacctattatatagagtacgccgaatgatgggttttcagttaacgtcgtttagcgctgctgtacatgtagcgatacatgttcacgtcggttctcaaccactttgagggagagaggaaagacgagagaaacaaccacgggttatatttttagtggtgaacttgacgccatcgctcatttaaaaggaagtggcctctcaacaagcccccactctgtcgaaccgcgcacacgcagcggcaatgtggacttctgtcacgcaggagcagatcgaccgcttagcactcgaagccttcttgccggtggtgctgctgctcaactacactcttctgatgtacctggcggtgttctactggacacggcgacgggagcggcgagttgcgttgctgttgttcgtcgggactctgggcactgtcgcggtaattccattcgcgcggccagatccagggttcgtggagactgtgaacgacatctcggaggcgtgctgcgtgttgaccttcctactgcagatcaccatcatcggctacgacctcaacaagaagttcaaaatgcgctccgtcatgtttctcacgtacgcagcggaggtgctgatcatggccgacctggtatcaatcctgctctcgttcgtagtactggtcagccccgcagtcatgtccgaaagcacagggcaagagatctccaacgttgctgagaatgcgaacttggcgttcatcttcatcttccgcttctactacattggaatatcgcgcggatggcggagtatctggaagacgcggaagttcgaggcttgctgctatctgctcttcgctacgcacgaaatgccgtttgacttgttgtctagcgctagcggcctcaattgggagttcgcgcaggctatttggcatcgcactaccctcacagtctgcttgcttataacggcgcgaaccaagatcaaacagttttcagttgcgacggctacgtaccacaccaacgtcagctccggcaacagcggcagggagaaacggaaaaccgacaatagtctcgcggagactgcgaatgtgcgacggaagatctcgggcttcctccagaaatcggtcggtcggtcagggagatcgggtggccgacgcacctcggggcctcaaatccatgtatctgtcgccgccatgaagcaggttggcgaatcgtagagaacctgttgaggcttttggcggtgcatccttggtgtgatcgctgccatgggctagtcacgcacctaccagtattgatgacgcatgcaggcaatgaaatgttgataagaaactactggggttcactatttgtaagctaaaacgaaggggtttggaagtccaattaatatcgtattgcattttgcgtagcctgctacggactccttactcctgtgtatgcgaaacacaggcaggtttcatccaaaatgcgtttgctttacgggcttctacggactcgtaattggatttgtcgcaaaaacaaaaacagaaaacgtcggtgttcttgctggttgactgcaccaacataggtcttctcagctgccttgctcgccgttttgctgtatgactgtgaggctgtgtgaagccctcgaacgttggaatgtgtgtctctttggaagtcatacagcattgcgaagaaccaaatcacaccttctacgagcccgagcccgtcaacttcaaaagtgggctccctcatggtaagtacgagatcatggttcgggctccccattggctcccctccagggctccccaaatttagcttcaaagctatgacgggctcttcatagtaatatctgattggccaattttacctagacttaaggcgagcaacttcgcgtgatcgatgcgccacgctagaagatcgagctcaaagatcaccacactagaagatctcgtgccgctcatatgtgtacagccgctccgaggccaccccagcgtcgccgatcgtccttccttcccctcaaggagaagccctcttccctatgccttttcaggttagaacctggagatacttcaatgacggccaatcatcagcgagatatttaacacaggtggggggggggcttaacgagggctcacagttctggagggctcctttcacttaacctattgaactcaagagcccaggagcccgagctcgcgacttttgggttcacccaagagcccaggagccgggctcgtagaaggtgtggaccaaatactcatggtttggtcagcccatggttccccggaaaaaaaaaaaactggacgcaaccgtaacattcggtgttgacgcgaacgatcacagacctttagcaatacggggatttcccatttttccccatatcctgacgaccactgaatatgaaagaagtttgagggttctcgtggcaggaacgttgattgaagtgctagacgcacgtattgactcgaaagtactaagtattgtcgatgcgcgttgcggtgagaagactgcgatatattatcacagtgtcgcgagctcaagcgaggtctgccagacagcgctaggaggtgatagcgcaaagcacagcaatttatcaccgggggctggcaaaaacaatggtggggctctggaaagaatcgcactgaagaagaggaggcagcttgatattatggcgatcaaactcttacacgtatcgagctggttcaacttcgcttgcgttggaaacgctgggtattgctggcccaatgttgccgagatacaggaaataggtaaggcgattaaaacgcagcaattacacgagcaggtcactacttcgctctggaaaacacgcggatacagattgggatctcagtttataagcggcacgtattagctggcgttctctctcaatggaagaaaaatagcaacgactgagcgaactggagcgtgcagatgctccccatcgcaaaatactccatagattttattgaagaagttgtttgggctgaccgttggcctccatcgcaaagccgtcgagaacgatagacgctgtggatttatttgactcggtatcatatacgttgaggtggtgacattgcgaggctgacgagtacttccgacgacgctgcaagctaaaggcatgttgcagcggccaatgccatcgcacgttgcaaccagctcgaggctgccttgttgcagaaagtgatgtctaagtggtgagccactacaaaacacgttcaaagctgccaagttcttggccaacgtctcgcgtggaggactgtcggtcgacgagatggagcgataactggcgtgtatggcggagcaattccgctcgttgattctcctaacacgagcgtggaatgccttgtccttgtcacgcgtcacacagcaacacgcattcgtctcgctcacgtcttcacaagtactttactgcttcgaagagtgctctgtaaggggtaataatgcgccatgccatccagtagcaagcgtttcgcgaggtttgcctgcgaacggcgaggcatcagttgcatcggtctctggatcaccagcgcgttgagtggtggctcgtgcgcagccagcagaagctagacctgaatatgaagcacaacgcgctagcaccgcctgccgccagcagcgaccctgggagcactacgcccagtagcgtgcagacccggagcaaagctgcggcgtttgacaaaacacgtcgcttcggtggcaccttccgcgacactagactcaactcaagaggaatcgcatcctcgtgatccgcgtactacgataatactcgtcttgcagaacaggcggtgcgcgcttgctttcttccgtcgccatcgaagtgccgtctgccgcttgtgagctctgtagacgctgtcgagctcgaagaagccagccggacgccgtgggactcacttagcccgagagctgagtactactggtcatggtgtcatgcacgcagcggtgcttcttcacgtggggagagcagtcagtcgggaagccagcagaggcagcgtatacttcaacaagaagttgcttttcggtggtcgtcaaaggtatctaacggttataaacccgttacaggacggttactcggttcagcaacatacggtccgaaccgtgttgccatcaaattattttgtccagtacagtacatcccgccctggcagccagtgatcttacagtctgcgatgtgcattgtgcgcgtccagcacttctctctccactgaagctgcacttaccggctgatcgcgcgtgaagggcttgtactatgcgaacgtgtcgtaactatatgtgtatttgtgtgctattttactgctgtcggaaatgatgagcatgacttttaacgcttcctgaggcgcgcagcgcgtggaggagcaaaattctacatgagattgctgatccgacccatcaataactttatactacttactgtagtacatgcttactttagacttgctggggttaagtaaatcaatcttttccactctacgactttttctcctcgtgtgtgcttgaatgggtcaaggggctgaacagtgtgctgtaatgatgtcgaaagtgtggccctgggtgctactcgttcacggagctttcgtcggcaagccatagtcttcgttggtcgtccgggagaagtcgatggagttcacaagcggcagacggcacttcggtggcgaccgaagaaagcaagctcgtgtcacgaagcagcaagacgatttttttgcttcggtttcttgcgctcgaagagacggagattgctgtggcgtgtaatgtcagcaaacttcgctgttttcggtgagctgcttggcggactggacccaaagaagtgcgcgaaggcactcaacgtcagcctaaatgctgttgcacgcaaagcgttcgtcagccttacaagctccaagggagtgcgaacagtggcaaccttcagttgttttgattcccgttctcaacgacacaagatgaatcgcggtagttcaggtgcgcattgaccgagattatcgtcggtggctccaacttcttactttgcacaaggtttccagggtttccagggtttccagggtttgtgatgaggtacagtgcaaagcgactcaagcagctcgaacgaattggagacgaacttgacgacgaacgagcgatgaccgccccgtggaaaagcgtttaacaccgttaccaactcgctggaaaccttctcgaccagcaccacggacacagcaggcaagcgtgcgagactgctcctgaaccgatgctagtgaagtaggtgacctcctcgacggcccgctcgtggctgtctgtcgatccttacgtttgcagcctgacggtcagctcattcctcaattcacccgccggtgtctaaccagcttcactcgctgaccttccaacactctcggctcaaggttcacacctgaacactcgccgcttcaccacgaccatgacgcgtctcgggtttgtgtccctcctgctggggctctccatgctctcgctcgtagtatcgggtgcccccaacggcctcctaggggatgtcctgggcgcggtgggcacggtgaccacgacggtgacacaaacactgacctcggtggtgaagaccgtagccggtatcccgtgcgacctccgtcggatcatcattgtcctgaacgacaacaacacggccgttctccaggccgccgcggacaacagcacagcgatttggaccgaggagaagcgcattgccaacatccagagcattgtcactgcgctaaagcagcacgcggatgacactcaaggcccgattatcacactgctggcggccgccggcgtgcagttcaagagtcgatggatcaccaacaccatcgaggtgctgaacgccccactggccctcgtccagcagatcctcacgctggtgatcgtgaaggagatcatcttcgaccttgtcatcacgctggaccctccgacgccgactgccgactcaaccagcaacacgcccactgccggttggggtgccaccaagatcaaggcgacgaacgtctgggcgacaagcaacaccggccagaatgtggtggttgggacgattgacactggagttcgcagcacgcacgaggtgctgaggaataattgggtcggagcctacggttggtacgacccggaccagaagactgcgacgccgtacgatgccaacggccacggcactcacacaatggccacgatcgcgggtggaaatggcgtggggattgcccccggagtcaagtggatgacgtgcaagggctgtggagccacttcgtgcacgctttcactgttgacggcctgcgcgcagttcatgctgtgcccgaccgacacgaacggcaacaactgcaacgccgccaaagcgccgcacatcgtgagcaacagttggggcgccggccagggcatgacgtacttccagccgagcctggacgcttggtacgcggctcgcatcctgccagtcttcgcgaccggaaacaatggagctaacggctgcagctccgtcgtatcccccggcgactcggccaaggccttcgctattggtgccaccgacacgaatgatgccctcggctcgttcagcagcttgggcccctctgtcaatggcctggtgaagcccgacttcgctggtcctggtgtgagtgtccgctctgcctggaacagcaacgacaccgcctacacttcactgtcgggcacgagtatggctgctccgcacctcgccggcacgatcgcgttggctctgagtgcgcgccccggattctgcttcgataccatgaaggcggttttgacgagctcgactgataagacactccccaatgctgccacgacctgcggcgggacggggaactcggtctttccgaacaaccagtacggctacggccgcatcaacgcccagaacgttgtgaacgcagcccttgcgtactaagaaggggccaacccctccgtccagactgggttcaagcctgcatcttcattttgttaagttcatgtgcgtttgtagcatcacgcatcggtgtatttgaatgcatagcgcttcaatctacatcatcttccgtaaattcatcttaatcgtagtgattcctccagctcggcagtcgtagaatttgaggttcagctttgctcgtgtttctttcgtatatatcgagcgacgcgaaggatgcaattcctcccaggaaaacccagagccttgcgctaagtactccacacggccatggacactctcatcggaaaaggaaggttctggcatggaagcctgcttcctcttctcgtccacggggttactgataaaattgagagagattggctcagcctgcagttgagcagcttggtccttcactgaattggtgatcgcctccgacgccaaccccctcattccagaactctgcaaacccaaagtctttccctggatccggggtgtcctagatgaccactcatcttcacgtgtgcgatgctggatcttgaagagttctcactgaatcaactgtcgggcggcaacctgcatccatcaaagcatgagaaacacagtatcgcttgcttatccttaccaaaaaccttttagttttagctggtgttgtggctacctggggtatcttggacgaaagagagaaacgtaccattggtattggtgatcaggagcttgaaccgagccttgatctagtcggaaccacgagtcgcgccgaagcctcgagcgtccaacgagttgagaagaatacacatgcataatacgctttgcatcacgagttttgaaaccctgaaaccagcacgaactccgcgctaaaggtgcagataattgatcttgaaacattgtttgcatgaaccagcctcgaggcaacgtgggtggccaagtcttgagtcagcttattatactagccatgctccatcgtctcgcaccaacgcaaggaaactccgatggcggatcaaaccgccaccacgggacgccttgctgcaatctcatctcgccggcccagcagtcagtgactgccagtcaccgctgctcaggaatcttgaccgtgaatgtgctgtgcgcaagacttttcgctgggtggccgacagcgcttggtgtgtccacgaacctggattcgtgaccttcgacagcaccgccgctcgcaccgcctcagcaaagtggacctgccaggacgggatcaccgcaacaggtctcgacagtggagaccgcaggcgccaatgtgctcgacccgtctgtacgaggacacatcatgcgggcaccgttccagctgacacactcgcaaagtgcgtgggggttgagtccttcctgcgtccttgcttggctgtggcgaagagggctaggacggcatctgctgcttcacttcgcatttcgccgtgacctccgagcagcatgtctgaagcgtacggcaccttcggggcgtcggctccgtcggcgcagccgcgtcaaccccgctggaagaagaccctgtcgtccaccggctttcgcgtcggcgctgtggtaggtgccctgcttgtggttgtgggcggcttcctgctgttccagagctcgtcgactccggtggccaagcaggtctcccttaagcgtgatgcctctgtattgaccccttcggagcgcacctttgtggacggcgtccaacccgagaagatgcgcgagttcctgcactcgtacgccagcgtcccgcacacgtgcggcaccgagcaggactacaagaccgcgctgtacacggccgagcagttcgcgtcgttcggactgcaggccgagatcaaggagtactacacgctgctgtcgtacccgatccaccgtcgtctggcaatcgtgtcgcccgagcagagcgtgcacgagctcaacctcaccgaggcgtcggtgcccggggacgcctgcaccaacgacccggacgcgctgcctccgttcctggcgtactcggactcgggcaacgtcacggcctcggtcgtgtacgtcaactacggcacccaggcggacttcgactggctggtaagcaacaacgtgactctggagggcaaaatcgctcttgtgcgctacggccgcgttttccgcggcctcaaggtcgcgctggctgagcaacacggcatggccgcggttatcatctactcggacccgaaggacgacggattcgtgcagggaccggtgtatcccgagggcatctaccgtcccaagggctccttccagcgtggctcgctgcagtacctgtcgctggcgtcgggtgatccgttgacgcccggttgggcctcggtgcttggagctccgcggctcaagtacgaggacgttgacagcattccccacattccggcactcccgctgtcgtatgagcaggcggacattatccttcgctccatcggcggaagcaaggcgccggaggcgtggcacggcggactcacctacccggagggctaccgtctcggtgacgacgaatcgctcgtgctcaacctggacgtgctcatggacaacaaggtcggcccgatctgggacgtcatcggcacgattgagggctctgttgagcctgaccagcaggttctgatcggcaaccaccgcgatgcctgggtgtgcggcgctgtggacccgagcagcggctctgctgtcatgctggaaatcgcgcgtggtctgggtgagctgctgaagcagggctggaagccgcgccgttctattgtgctgggctcttgggacggcgaggagttcggtctgctcggtagcactgagttcgctgaagagcgcgccgaggagctgaagcagaaggcggtggcgtacatcaacgtcgacaacgtcgtgggtccgctggctctggccatgggcaccccgtcgatcgccaagttcatcgaggacactgccaaggccgtgcctcccaacgagttcttcggcaagggcgacaagcgcaacgagcctggtgacagcctgtacgcgcagtgggcggctcagaccgcgcgtcaccgctcgcagatctacggcgtgtacgacggcacgctggcacccgaccacctgatccagttcatgggctctggctcggacttcaccccgttctaccagcaccttggcgtgatctcggctaacctgggcttcacgctcaacggcgcggtgtacggcacctaccacagcaacatggatagcctcatgtatatggagacgctgggcgacccgcaccacgcgacccacgccaacatggctcagtggtgggggctcatgaccatgcgtctggccaccgatgtggtcgtgcccttcgacttcaccacctacggcctcgtgatgaaggaggaccttgccggcttcgaggagaagatcgtggccatgaaccgcagcgtggacttcacggagctgcacgcggccatcgcgagcttcacggacaacgcgaacaccttccacgctcacatccagcagttcgaggctgcggacgacagcagcagcgacgagttgctgcgtagttggaaccagaagctggtgctgctggagcgccacctcattgacgagactggtctgcctcaccgcccctggtacaagcacgtcatcttcggcccgggcttctacgaaggctacctgggcactgccttcccgggtatctcggacagcgtggctttcggcgacaacagcaccacgatgcaggcgcacgtcaacgacgttgctcgcatcgtcaacgatgctgccaacttcctcgtcattgcgtagttaaaagacacagtcaagcaatacagttgagaactctgcaagaacgttgcgcatcttcccaggaattgtacttgttcctacgccactcactctcggaaaggatcccgatcgcacaagccaaagggacacgatgatcatctcggacactcctgaaagcaggggacggctgagggtccgtgcagagttctggaacgaaggggttggcgtgtttagcaacaagctgtcggaggcgatcaccaattcagtgaaggaccaagctgctcaattgcacttcgagccactcgttctcaatgttatgagtaaccccgtggacgagaagaggctgcaggcttccatgccggaaccattctccgatgagatggaggcagtccatggtcgtgtggagcagttggcgcaaggcttcggcttttcctgggaagtagcgcgcagtacgtggcaagccatcaagtctgaaccgggcgtggaagagcaaaccattcatcgagacttcacgggtcgcgagatcgggctggccttttatcgcgagcgctgcgtgcaggcgaccgtgatcgtggcgctgatgccggatacgaagtttatcgtgtacccggatcagttcggcggccttgtcggacgaaagagctcggtttgcgtcaccctccagcccggagacatcctcttctatcgaggtgacatggtgcagtcgatggcagcttatgacgagttgaacatttgtctccgctgctttgttcgcgtctggggcgtcccgcagagtgagaattccagtgaaattgcagcgttcgcgtcgttcttgtgctcgtactgcctgcagagcttcgatacgaaagaagaagccgaggaacacgagcaagactgcactgcgaatcctaatacagccgagctggaggagggcgatgcagtgcagaagtctggagcgtgattgtcttcacaacagcgatccaaccgtggattttaccactccaagagcagtctctggtggtaatgagattttcgtgattaaccattagtcggcgtaccctgttgctggtaggaaacttgacgcgtacatatccttaagctccatctgagctagactacgccttcccaccctcgtccatttcctggatgcgcttcaagcgcttgacgtagtacgcgagctcgcaggtgagcgtccgcttgagccccgacacgtgctccttcttgctctcgacgttggtcagggcgtcgtccacgatgttgatgcactgaacgaggtacgcccgctccgcgtccttgctggacataggcgcaccggccacaagaaacccgcccacgcggtctactccattgcgcttgacctgctgctgcagctgcggtggcgaaggtggtgtcattggcgtcggtggaggttgctcctccctgctgggaaccatggtgttgccttcgccctcgtcggcgcttctcttgagtggggtcaccttcgtcgggacaactggcgcgtcgttgcccgccaccttccgctgcagcacctccgtcagcagctgcacgtgatcctccttgttgcggtaccccgcgtacgctttggagcgcaccttgacgcccagtgcgccgaggaacgcgcgcaggtcctcgaagcggctctgcttcaaggcgagctgcagctcgtcgtccttcctgtcggcgcaaagtcgctctagctgctccagcgtcgccttcttcgtcatcgtcaagcgtcacgtgagtgagtgagtggatcctccagggtcaatttcactttgagttgccgccgagaaaaagttgcagttggcaacttcgagccggtgatgaccccagtatcgacggcaagtggcaagttgaagttcaggttgtgtgcgccacaccacctccaccgaccatcactctgacgcctctcatatcccccgcattctatcgagccgccatgggcaacgaggtgagccgccccgcggaggacgtgagcccgcagagctcgggcgccgtgccgccgcgctcgccgtacacgccgacgggaggcgcgtcgcgtcgcgcgcagagcttcaactcgcgcccgccgtccccgtcgccgggcgcgcagcagccgccgcagccgatgcagcgccgctccagtagcagcgcgagcctcacaggcgtgtcaagccccgcgttaaaccccaagaaggagcgcacgatccagcgcatggacaaggccatccgacggcgcgtgcgcggcggcatcacgtacaacatgaagctgctgatccgcggcgccaaaggcacgggcaagacgtcgctcttccagcggctcaagggcgagcccatccccgagacgcaccagtccacgccgcagctgcagtcggccacgatcaactggagcttccgccagaacctggaggagaacgtcaagtgcgaggtctgggacgttgtggaccgcggcttcgtgtctgtggaccccgagggcgacgctgaagacggctcctcggcccaacagaacgctgcgcgcggggccagcgctgaacacggagggctgcagagtgggggcagcttgtcggctgaagctgccgctgcagccgccgctgcggccgctgcaatgcagaatgggacgcactcggtggctatcgtggacgcctcgacggtggacgtgtatcatgaggctcacggcgtgatcttcctgctggatgtgaccaagtgggacacgctggagtatgtgaagcagcagctggacagcgtccccgtgcacattccgacgttggtacttggcaactttagagatcaaggcgcgcagaggaagattttcaaggaagatatcgaggagttgctgtatggatcgagtgacagaccgcaacatcagcagtggaggagacctaccgagctgctgtactttgagtgctcgctgctgaactgctacggattgaagtcgctgcaccagtacttcggtatcccattcttgcagttgaagttggcgacgatcagacagcagatgcgcatcgtggagggtgagttcgtgcatctgaagcacgatgtacaggcgacaatcagtgagcagcgctatgccgagtatgtcgagcatatcaaggctactggctcagatatacgcacgggaaggcgtggttctggtaacgggaacacaccaaccgctgcatcacgaactgactcggtcagaatatccccccgggcaagcaatcaatcgactcccacgacgcagcatgaaggtgcagatgacgatgtcagcgtcgtaagcaagagggacacggctggaacaccaccgaaacctgcaccagaagtcccagcgaccaccgcagcgaatgcaccggtccaagaatcacaggaatcaccacaggttgttgacgcagaagatttgcctgcacgaagcagcagcgctgttattcaagcagcacctccgttgaagttcgagcacaaggaaagcgcggcatctatcccagatagtgtagtgggaacagcttctgccagtgtcgaagagaatccggtgtcgcctgagcgaagaaatgttgataccgctgcggctggaagcccaagccgtcctcggaaagcgtcggttgaggaagtgatgcaccttgaagatttccaagtaccaaaagcacgtatgagtgacctggaccacttttattccgaggatgaaagtgatgatgatgctggagaccttgacgaagatgttgtggtggcaccggttggtggagccaagaaagcaagcatcggtggtgtataccacaagcaacgctttctcgactccgattcttcggattcggatgagagcgaaacatccaaaacgcagagccgacgaaaggcgaacgcatcacgcagaaaatctcctcgcaacaccgccgtcaaacaaactagctctgctggtcaacaaatgccaaggccgcctacatcttcgtcaccgtctccaccatctccacaccctccaaagtcattgcctcgaccgacccaaagaagcagggtgcgagcgcagccgagcagtccagcaaaggattcgcaagacgtgctatctcagcagcagccgtctattcccagtagtggtgctcccggttctgttacaccgacacctccagcgtctccacctacgtctccttcgacttcttcgattcgccattcgagtccacggaacaaaagcgataacatcacgacgaccccgcaatcggaatcacgtcaatttgtatcgcccgttcaggtagatgaaagtgaagtgaagcgtgatgtatctctgggagaagaacctgagttgacgggcacagaagacgctgcactttcagttgaccagaacgttcaagaaaacactcaggaaattaccacacaccagagtccgaagcacctcgatgatgacacctacgctttcagtgagcaagtggatgatacacatacgtcagcattagcgggcgactccgaggtggctagcaatggtgcgcagaccgaggcggaggacagcggattgcctggctcgcttgatggaaccactctgacagcaaccagcacagaggatgacgccaagtgtgagccgaaggatgtttcccaagctcccacacacgaccacgaagatacccccaccaataaggccgatcgagtctcggtgggtggtgacgatgaggatcttgggctgggcaacaaccacaacgaattgaactcattcctcgcggatggagacaacagtgatgaagacaatggcacgcccgaagcacttcaagcagaggaaactgtagcggaagaaccgatgccacaggctgctccggttcccagtcccgcagttcaacgtccagatgtactcatgagcgatgaggatagtgaaagcaacgacgacaacaagggcgactcgccatctttgtcactgtcatcgctccaagcgtccttgccgattcctgaaacatcgccgtcggctacttcagttctggctccaccgaatccggcaaaccctccccaggatcaaagcatggggaactaccacaatcggaaccttcaggacgctggtgacctcctttcgttatctgctcttcaggcatctctaccgttgcctgggcaaagtgcggcacctgtgcctccaacaacgcaggaaaatgctggttttactcacaacgagcgccccaccgagacggctttgcatatttcagatcttcaggtcgtttccactacaacaccggtgcccgacttctccacggtcgtgccgagcaatgatctggaagcgtttttgaacgaaagtggcagcgattccgaggacgcagccccgccgagttacgcagcgccgtcgacaaagcaaggcaagagcagcagaagagcagtggtggagtcgagcgacgacgacgatgacgaccaggaccggtttgccagctacagtatcagcaagaaaagcagatctgaacgcaggcgccagcaaaaggaagacctccgccagctgaatgccgcgctggacaaatcaccaggttgggatggagtggaaaacgagcctttcactccgtcggcgactggcgttgcagcttcggacacgtcgttcgggacgtcggacgtgatggaggccattcgaaaggcacaggaagaggcgatgcgtatgctcccgaccgcctccgcgcccgcggacgacgacgccgagtccagttcgtcgaagaaacggcacaagcacaacaaacacaagaaggagcacaagcacaagaagagggagggcgaggacggccccaaggagaaatcgtcgaagaagagcagccgcaagtccggatcgagctcgcgctcgaaaaagcggcgtccccacgtcgaggacgatattgagtgataagggaaggagtgcgtctgtcagcacgcgcatgatgtctagttgagttatgtcccgcgtgtatgctacggccagcgccccgctgggcttgagtgcagctgcgagaatatagagaagagtcttgtagaggattcgtgtggtctgctgaccagcgtgtgctggaaccgagcgtaccgcccgccacgccagagcgttagtttaatcaaggcgccggagtggagctggcccgatgtaagcggatcagcccgttttgaggttttgcgttcgccctgcagctcgaaacagaattacgtgttgacctgtatctcatctgcttgccgggatatgcgctgtgtgggctctgtaaacaacattagcagcgccgtttctcgcgatgtcgcgcctgacagctacccccgcggttggggcgggcatcatgcgatgcgtgacggcgtagcggcaaatctcgccagttgaataacactcacctggccgggagctccgcaggtctaatggcgacgcggtgcgattgcagaaagctgtccttcctccagtcgaggaaccaaatccttaggatgtttatgtctgcgctgcctgggctctagaagatcggctctagaagatacgatgtgctgaggtgacaacgtagcgcagcgtttccagcgcattctggagctcccgcattcccgcttcacgtcggaaggatgctgacaactctcgacaattgctcaaaagataggtatcgcgttagcacacgcgtaacgcccgccgggccatttccagttttgccgccaacgtcgcactgccgtcccaccaggtcagcctcgcacagtgttatagtaacatgcacatgctgttccagagcgaggcggcctaccgacggcgccgctcgtggatgccgcgcgagggggacggggccacggcgctcgtcgtcacaaggccaaagctcatcggcccacggcgaccgcgcgatcgaggcaagtcgcgcagctgcaagacgaccaggcgggacgccagcgcggcaaaacggcggacgcagaaccaagaagagaacgagccgcagctcacgctcgaggaagaagccgaggacaaccaggaggaggaggaagaggaggaagtgctcgaggtggggcgagataccaggagtaccctgcgcggcgaggtgcgcgccatgcagatggagatcgaggccctgcagcagcgccgactgctgctggactcggccatggtcactgcgcgcaccaacgcggtggcgcatgccatcaacctcaccaagggcttctacgtgcacttctccaacggcttcgacccgctgaaccatcccgagcagtccagacaagccgagactttccttcgaggaatcatgaggaaggacgccatttgctccgaattccagggcgttgacttgttcctgaaccagtacaaggtgtgcactgagggccacacctccatgcgcgtgttcgtccacgacattgtcgtcatcaacgaagacctgtcgtccagggacggagccatccaggtgctggccaaggctaccgcgcgcttccgcgtgagccgcgcgacgctcgagaagttcttcccgcgcatcatcgacgacgaagaactggcgcagcagctcatcgggaaggagtacgcgatccagtacgacaaggtgttccacttcaagcacggccgcgtgtttcagcacgagtcgcaggtggacttctgcaacagcatgctgcagatggcgcagaacccgttcgtagccatgaagctgctggaggcgtcgctcatgaccaagcacggccacctcaagctcgataaccggatcgaggaggacatgaaccaactcgagaacacagtgctctaaggacccgcactgcaaccttttaacagcagcaagactcaagtaagaagtgaacgtgtaattcaagtgtatactttccccatacaagcgtacaagcgtacagtacagggcgtggcctagatgaggaacgagatgaagccgttgagtccgctggcgagcacgcagagctggccgagcgtccagagcagcgcgcggtgcggttgcttctggttcacgtacgcaaaggtgtgcgcgatgcgagcagccgtgaagacgcccatgagcacgcagttgatctcctcttgcccaccgacgatcaccgagccgatgaacacgagcagacccaggggaatggtctccaggtcgttctgcaccacccgcttccagcggtagtcctcggcgcgagccttgcgtagctgctccgagatgggcttgtcgtcctcaagcagtccgtaggtttgagcaggaagtccgtcctgacttaggagaccctcgtcttcaggcggccgcgcgccagcggcgaaggacttgccgccctggatcgacaccgtgatgaagaacttgatgaacaagatcagcgagcacgtcgagtacgtcttgaccgccgcgttgagcgcgaccaacgccgtcatgttagtgggagattcggagggttctgcttgagctcttggcggcgttttacacaataatggggcgcgtctccgcgcacccggggatacaggagttggatcaaaaagggtcctggccatcacctcggggaatccaattgagcgttctcattttcagtgatccttaccataacgctacgccctcgttaaatgaacttaaagcttgaactcgctgggaggccgctgctctctcttgtggatcctccacacaaccttataggatggcgttgacgacgttgcccaagccaaccagcgtagccaccacacccacgccgtaggtcagcgaacgcatcggctgcatgccagtcgcgtacgcgcacgtgtgcaggcagcgcgacgccgtgtacgcgatcatcgcgcggtagtgcacgccggggtcagctccggccatgatgccggcaccgaagatgaggagcgcgaacggaatggactcgaggtcgttcatgacgatgcccccccaacgctgcgcagcctccagcgtgttggtgtcgctggtcttgtccatgccgaaagtctgcttgcgtttggctgcggcgagcttcgtatcctctggtgggcgtccaccggtgacgaacttcttggcgccttggatcatcgtcgcggtcaggaacttgaggtacagcaccgacgtgcaggccacgtaaaccttcacgctcccggtcaccatcgcgtcaattctcgttgcaacaggtttcttggtcactgggtcttcggagaatcaattgtgacgacagaccggcgtctcaatgctgggacgtgggcaatgtgaagtggggacgagcaattcgacattgaagaacccactgccccaacagagtgtctgtccaagcaacgggtttggctttcgaagcgaccgagggcgtgttgcttaccaacttcactgatagtacgaatctgtcggttcaacatctagtttctctatttcaaattacaactctactggcccgtgcttcggagtggcacgcgcatgtaagtaccaacttagtaaaattaccgcagctacacatacgtgatggtgctaggcgagtagttgcagagcttgcccttggggcccgcgccagcctcgtccggctcgccgcccgacgtcgtgccgtccgaccacgagcacacgttgatcttcttgcccttgatcttaacgtttccaatcgtggcctcgtcgccccagttctcgttcaccgtgacgagactcacgcggccgttgacagcgtagacgttcttgacgttgaccttgaggcccttgtagccgcacgtgccgcacgagcggtagagcttgccgaagtcctcgacgtagaagccgtcgatggagacggtgccgtcgccgttgtgctggatgaccttgtcggtggccgagcgcgcgccgccgccgattaccttgacgacgctgctgggcgagccgcccttgatgctcagcgcgtcctcgcacacagcgtcccaccaaacgttctggatcgtgcagccgctttgctcgcagtggacaccctccatttggtcctgtccgatgatgacgttcttgagcgtgccaccgggctcgacgcggaacacagcggtctcccagccgctctccgtctggccggcgcacttgacgttggagcgctggtacgtcttcatcttgccgtcgaacacctcgcccttcttgacgacgtagggctcgtcgaagaattcgtcgccctgactcgtgggccacgcaccggtgggcatgccggcaccgccgccgccgccctcggagcgcatcgaggcacccgaagcgatggcagccgtggtggcaaggacaacagcgatgaaagagcaggcgctgaccattgtcgttgtcggaaagtctatgtgtgaaggtcggccggcggctgcttgggttgtgttgcttgatgcgaagagcgcaagttggataatggggatcaggcgactgcgtagactttgcggtgctgtgacggcggcatcggcctgctacagtctggcgtcccagccagccagccgagttcctaccagactttccatcgcaaatcctgtcgttgccaggcgtgtcgtcaagcaaagactccgggatgccagatgctgacccacataagatcgtggtgttggtaaacacattgataggcgactgggttgatgacgatctttgctccgtgatgcagcacggtgccaggaactcagatgttagttgaacgactaggcgatccgcgtacatatttgagccaaagagtcacttggatcaaccaaacttattagttgaaggtcattacgtttcccgggctaaaggaacgtagcactgcgccgatgttgattgagttgctacatgtagaatttgaagtgcattcatcgagcagcacgactcgtgctcggcagtaggctggagtagacattgcgagttcatgctgcactcgagcaacgtggtgtctccgagttgcgttgtgcttcgttccaagatgccgcctgacctggtggacgtgccgcgccgatgtgtactgtaccaggctcgccaggtggcgactacaccaacaccacaaggaggcggacgaaaacggtgcgccacgccagggaaagagcggacgggcggcggaatgtggctcggtggagtcctcgtcgcacgatcggatgaagtctcgactaaagggtaagcttagtgtacatgcgtccggaaagtatcgttgggttggtctgtgtttcaaaggagaagactcttcttctgaataaaattgagtgatctggtgtcggttctacatgtatgctgagagccacacgcagctggctggatgtacacaacagttggccccggcgggctagtctgggtgggctgtgctgttcgcagggtttacgcagctgtgcggacgcagcaattagcatgaacgatgagctcgagctcgctccgatggctacgtgaagaaaggagaagaggaaggaaatgaagccgtttactccgtgtagcagagtcgattcaagtccattgaaacgattaatttgtctccagattaaaatggtcgagcgggtacagtacatgtaacagcgtcgttgctacaacaacgaggcgcggcgtgttactgtagtgtgtgttcggtactatcgaaacatcgggtcttcgcgaaaaagtcgacatacggcatcgccactgtcctaagcgaacctcaatgtgcattctagaagttagggttagcttcatggataaatgattagattctaaaatttatatataggctaaatcatccgactcaaaatatgtgctcggcgacgcgcccgtctccatatattgtgcgattatagtcatttgccttatgctcgaccttccttgtatatttgaataccttgtggtgcgttgatgcgaagcatgacatattcttcggtcaatgcgctcgccatccgtctatgattagcgtgcttggcacagcagtttagcatcaagcatatgtcgataatatgactctctcattggtcaatacagaaattcgcttaggacaaaacttcgcttaggacaggggcgatgcggtactcagtggcgatttgagctaaggacgaatcagtcggacgctggttccacgggagtgctggacacgccgtgttggcgtcaggttatctactgatattaatactacgtactgtagtaaaatgaacatacagtatgctgactacagcggttaactggcctcacgttattagacggaaccgaaaggaaaaacaagctaatgttgttcgttttaacgagtctttctgacaacgtactacatgtaaaacatacaattacaatatgagacggtttcaaacgaaatgatgtttaggcgccatttggtgttgtcgagataatcgcgtttgaagttgaccaatcaattttcggaaataaccggacatcaaactttcgaaagtgaaaaacacacataaaaagcgtaaacacactctgctttgcttacttttagcgctagctttctgataatatacaatacgttaaattaaaaaaatatattgaggtcacacgccccaaataaaatacaccgtattattgctatgaccagaaagcccttggttcgttctacaaagggggtgccttgtacactgtcctctgttgtccatcacggtaaaaatgcagatcgaaaagtgtcatatataacatatcacatttcggtttttgtccttaattctaggacaaaaatcgcacattgacttgatttcattatgtggatccagacgttacacctctcacacagtatgtacttgttacaaatgacacctcgtacttacccgggcgtgattacactcaatacaaacgccgagtttattctggtccttttttgcggtttaaggacaaacccccggaaagtacctcgtacttaagcggagttttgtccttaaatcaaggacagaaatgttggggttaactagatcgtcttggggacacctgtggtataaaacgctggtgctgggtaccggtgctaattgccgtgataagggagaactgtggcccgcgagattcaagggcgtgacccctgcggggccacacccatgaatatcgcgcgtgccgctgttctctttctgaagctagtgcatggagctgttgatatcgatgtgcatttcctcatctgccttgctgaaagttgctgttgaacctacatgatgcacgaaggttgcaccaggttacgcgttacgcttttcggtcacgcaattaccgcgcctcacacaaagattactttggatgtagcgcgcttggcactcttgtaaccatttgctagaaaggaaaatatacattcctgctaaaatgtagctccgtaacttcaaaagctggagaatgatctacaaggctcagctgtctgattcaagaggagggaattgtaaaccttgttggcttgcggttgacccctgtgctcttggaaaagctcattattaggctgctggcctgtccgaggcggctaaacagttactctatcttccacaccgaggcctgttgctctaacattcggaaggcgaagctcaaacgcttcaaattttatgttaaccagcgatttgaaaatgctttgtgttaggaaaaagcaatgaaacgaaaccaaatgctcgaaaatcttgttttggcattctatctgttaaccattctttctgtgaggtacggtaatccgttgggagctgtccaccccctcattcttcgggtgttcacagcattaatggtaagttatttgcgcagatacagccgccgcgggaccaccgctatggtgatcttgtatgcagtgctgctactgagcgcgggggtggccgacataaccgcacaaattcaaattcataattgcaacaggtagaaattccatgacaaacgatcaaaaggtagtaaatggacctcggtgtcacttaagctagccgtaagtatggagcgatattgagatgctcgttatgcaaacatgccgaaccggtattggattaagcttgcttattataatacatttatttaatcctggtacagttattgatataaaaatgcttgcaaagctccaggtctgtatcaaaagaaaaagtttaccgctgtagtcagcatgtatgttcattttactacagtacgtagtattaataccagtagataacctgacgccaacacggcgtgtccagcactcccgtggaagttccacatcagtcggacgctggttccaccgtggaaccagcgtccgactgattcgtccttagctcaaatcgttcgcgaagacccgatgtttcgatagtaccgaacacacactacagtaacacgccgcgcctcgttgttgtagcaacgacgctgttacatgtactgtacccgctcgaccattttaatctggagacaaattaatcgtttcaatggacttgaatcgactctgctacacggagtaaacggcttcatttccttcctcttctcctttcttcacgtagccatcggagcgagctcgagctcatcgttcatgctaattgctgcgtccgcacagctgcgtaaaccctgcgaacagcacagcccacccagactagcccgccggggccaactgttgtgtacatccagccagctgcgtgtggctctcagcatacatgtagaaccgacaccagatcactcaatttattcagaagaagagtcttctcctttgaaacacagaccaacccaacgatactttccggacgcatgtacactaagcttaccctttagtcgagacttcatccgatcgtgcgacgaggactccaccgagccacattccgccgcccgtccgctctttccctggcgtggcgcaccgttttcgtccgcctccttgtggtgttggtgtagtcgccacctggcgagcctggtacagtacacatcggcgcggcacgtccaccaggtcaggcggcatcttggaacgaagcacaacgcaactcggagacaccacgttgctcgagtgcagcatgaactcgcaatgtctactccagcctactgccgagcacgagtcgtgctgctcgatgaatgcacttcaaattctacatgtagcaactcaatcaacatcggcgcagtgctacgttcctttagcccgggaaacgtaatgaccttcaactaataagtttggttgatccaagtgactctttggctcaaatatgtacgcggatcgcctagtcgttcaactaacatctgagttcctggcaccgtgctgcatcacggagcaaagatcgtcatcaacccagtcgcctatcaatgtgtttaccaacaccacgatcttatgtgggtcagcatctggcatcccggagtctttgcttgacgacacgcctggcaacgacaggatttgcgatggaaagtctggtaggaactcggctggctggctgggacgccagactgtagcaggccgatgccgccgtcacagcaccgcaaagtctacgcagtcgcctgatccccattatccaacttgcgctcttcgcatcaagcaacacaacccaagcagccgccggccgaccttcacacatagactttccgacaacgacaatggtcagcgcctgctctttcatcgctgttgtccttgccaccacggctgccatcgcttcgggtgcctcgatgcgctccgagggcggcggcggcggtgccggcatgcccaccggtgcgtggcccacgagtcagggcgacgaattcttcgacgagccctacgtcgtcaagaagggcgaggtgttcgacggcaagatgaagacgtaccagcgctccaacgtcaagtgcgccggccagacggagagcggctgggagaccgctgtgttccgcgtcgagcccggtggcacgctcaagaacgtcatcatcggacaggaccaaatggagggtgtccactgcgagcaaagcggctgcacgatccagaacgtttggtgggacgctgtgtgcgaggacgcgctgagcatcaagggcggctcgcccagcagcgtcgtcaaggtaatcggcggcggcgcgcgctcggccaccgacaaggtcatccagcacaacggcgacggcaccgtctccatcgacggcttctacgtcgaggacttcggcaagctctaccgctcgtgcggcacgtgcggctacaagggcctcaaggtcaacgtcaagaacgtctacgctgtcaacggccgcgtgagtctcgtcacggtgaacgagaactggggcgacgaggccacgattggaaacgttaagatcaagggcaagaagatcaacgtgtgctcgtggtcggacggcacgacgtcgggcggcgagccggacgaggctggcgcgggccccaagggcaagctctgcaactactcgcccagcaccatcacgtacgcataagtggcttaatagtggtaggaaagtgttatctccagtttgtagtgcggagtttttgaagagtgtgtcgtccgaatagaaaatctagatgttgcccctagagttgataaaatctgtgcaaaaaggatttatcgcaccaatttttgacgcatacaaatttagcctagaatctttctaggtctaaatttggaagaccttttttagtactagtaaaaaatgattttttggcaaactaggcttgttttgtaataagtagatatatttgaaaaaatagagctgacacaaacaacaatctgggttcttcgtaatacaaggcagccgaactgggagcaatatacgcaaaaccggctcccgcaacaacctccaaagcgtacacgtggtaatacaggctgtcgcgggcgcactgccgactgtttcccatcctgaatttttcaggatacggtaccacattaacgtaagtttgttccgctgggatccagcaatccagcacttcaataagctaacgagtgccttcaacttcattacagccaacaagttttctcgtagttggccagatcccccctcgactgctagtaggtatttttcagaatgtgataacttgctggtgattgccgtgtttgcaatagatggatagccaatggttattcggacgaagtggaaggaaattaagttcatacttctagctacagcgagtagctgacgtgtgcccccactacttcattaacatgctgtcgagcgggtgacagcctgttctgagagtagccatcctggtgcgctgcaaccatgctatcggatacaattgtccagaatctttgaacaagcaggaccatatctattattgtactaaagtatatcaatcaccgtctgtatttgagttaagttgcatcgtcacagatcctatcctgataagatgtatttaatctaggattgcggccaaacatcctggcgtacatgacagcacacagcaaaactatcatttgtgtaccgacatctggtgagatcgattggacttttacgccacgtgactaagccacgttgttaatcttcaaaggggcggaatccaccatcctcgacagcgtctgccgttccgcccgcgtcaagggctctacgtcgtatgtcattcgacatttgctttgtcttacagtagtcccagtaacaacacacagcatcgccaccgatgaagttccccgtatcctgctcgacaatcctgagtgtgcttgtgctgctcttcagcagtactgccagcgtcaacgccgagtgctccgccgtccacatcgtcttcgctcgtggcagcggagaaatgccaggtctggggatttgtggtgggcccctcgtgagcgcgatcacctcgaacctcggcggcatgagcgtgtcatcgtatgctgtcaactacctcgcctccgtgacgcagacgagtgccggccctggtgcgaccgacatgaccaaccacgtcgtggcagtcgcacggcagtgccccaacaccgtcttcgtcctgggtggatactcccagggcgccagcgtcaccgacatctcgatcggcatcaagacgatgctcggtgtcggcaagagcatcccggagaatctggccccgcgtatcaaggccatcgtgacgttcggcaaccctctgaaactcatggggcagaccattgcgcgctcgagccagctgtatgggtccaaggcgatcgagttctgcaactttggcgacccggtgtgcgcgaacgggtttaacactatggcgcacatgatgtacccgatggacggcagcgtgaccaaggcggcccaacgagcggccgcactggtgaagggtggtgcgggggcgtatcgtgcattaaggtctgtcagagccgcacaggcataagatgaccattttacttgtgtatgcgtcgaatttcatgtgggtcccaaaggtcatcgatctcaatgaacaagctgttttacttatatggaaaatatattgatcttctatcgtagctcttgtaagctcatacaaaaaaccaacttatttattgacatctataacccttggggtccacatgacattcgacgtacacacgacaacttgtacgttggtgcggagcagaagcaacggcaagttcctgcctcagcacttcaacagacttctctatccacgcagcgctttcgcaccacccttcaccagtgcggccgctcgttgggccgccttggtcacgctgccgtccatcgggtacatcatgtgcgccatagtgttaaacccgttcgcgcacaccgggtcgccaaagttgcagaactcgatcgccttggacccatacagctggctcgagcgcgcaatggtctgccccatgagtttcagagggttgccgaacgtcacgatggccttgatacgcggggccagattctccgggatgctcttgccgacaccgagcatcgtcttgatgccgatcgagatgtcggtgacgctggcgccctgggagtatccacccaggacgaagacggtgttggggcactgccgtgcgactgccacgacgtggttggtcatgtcggtcgcaccagggccggcactcgtctgcgtcacggaggcgaggtagttgacagcatacgatgacacgctcatgccgccgaggttcgaggtgatcgcgctcacgaggggcccaccacaaatccccagacctggcatttctccgctgccacgagcgaagacgatgtggacggcggagcactcggcgttgacgctggcagtactgctgaagagcagcacaagcacactcaggattgtcgagcaggatacggggaacttcatcgtggcggtcgatgaggggtagttagttggctggtacttgctcgagacaagagaagttgtcaaatgatcggagaacggagcccctcgcaacccacagcaaacttcgaataggaagtcggatttccaccccttgaatacaaacgacggtctcaccagatgccggcgccagagtcatgcctcctgctggtgccgtcatgtcatattcgctgaggtgttgatcgcaatctccaaacttaagagatcttatcggcatgtgtaatgacgtgcagtggctactcgagctttaaaatcaacacagtttggtgagttgatgaaaacttgcggccaacatacgtacaaaagaataggacacccacatcttatccagcggatatttgcttgtttcatggtatggttgaagcgcaccaagatggccagcgctgagcaagctgttgcccgacaactcgacagcaggttaacgaacgcataaagcggtggcagaatgtccgctatagatccttccttcagccggtagacggcaccaactcggtggccgtctaactacatgtagtttgcaaggggcaataacctttgttcgcaacggtatctcaataaactgcgcgcgctgcgggaaacaatcacagctcgattcaaagctaatatctttgcgagtgccggctaaacgcgaggaggtgcggtggtctcaacaggagttgaatgcactctctggttacacagtcgtaaatcatagctttcccataaacaaacactatcctccacaaatctagcccgcaatcactgggtcgcagatgtgactctcaaagcttaccagtgtgatgccaatgatagtgttacaacatgattgcattaccggttagatttagttgggctgttgacgcagttgccgtttccgcatatattgcacgtctacaatgcaggatcgagcccaaaaagacgccacaaaaaaacttatcgcgtttatttgaatgaaaagcacagagtagcatttgttgcgagtggggattccgtgcgaacattctataacgcgcgaatgcgaccagcgaccattttaccttggaataactcaccccaacaacatttattgaacgcaaaatacagcatctcctcacgaattgcaaaccaaaggtggttctacttgtagcaacctggtgaattactccgttactgctcagcaatttggtcgggtaaacaaaaacgaaagaagagcaatgggttgcccacctttgggttgttaatagcatgtggtcagtatcaagccctgcacaaacctcaccagaagttctgagtttttttaagcgcagcgtgtaaggcgatgcagctcaagcagattacttggaagtacatgtgggctacgtagctggcacgcagatcaaccgcaaacgattgagcgtactgcacagtgtcttgcagttaaatttgcaatcttgccgcagtgcaccgatcgtcgccggtgcttggatgctgagattaaagctgaatgatttcgttaagacaaccaaccttgactattcgtatccataaacggtacagttatcttaaaagataggcttgattcagggctggtaaaacctgccgatttttttaaaacgaaataggtttttggtttaccttggtttaaaccaatataacctagtttttatttcttgactaagctttgctactgcattcgtcttcctgtttgggttcttgttaatgtagttgcctatgcaaagcgcatgccgagcttgatgcacggagtgagaaggatattaagaggccgaatacataatagttatgtcgacgggctctgaaataccacgttgtcagcgaagaattaaagtagtgatgaaagtatgattatgagtgtagttagagtcggctctatgctgatttcgccttttcgttatggacagccttagcgcccaggtttcccagattcagatttttctcagaaaactgattccacaggtattgcccaagttttattccaggttatctacaggtttttcgaaaccctgccgaatccgatgaaagtaatctatgtaaattacctgaccaggtataatgcgcgtggaaaacctggaagaatcatgtgtgcggaacttgagcaaaagtggaagtgacggcgctcggctcgtgtcggaagagctctagccaatcagtcttcagcagtagagtccgggtttcgtgcaggtatcaatacctggaatactcatgtgtgcgctacttgagcaaaagccagagtgatgagcgtcgacttccgtcggcatggcgagaaccggcaagtgaagccatcactcaagtatggctccatcacgtaactccaggtgttgtccagatggcatccacgtagtgtccatgtattgagtttagcctcaaaatgcactatgcttccgtcatctttttgcgactagtgacgattcgtcttcaggattgcttccagcattgcccagcgtagcttggtgatacccgtcggtattatatcacttggagcgtcgtcgctaacacaggtccagaagaagcgacacacgaaaacaccgcagctatcactgtctgactgaagaggctcggtcacctcgacagtcgtgcagctcgacatagtcgcatctgcagcaataatctcaatcgcgatcttcttcaacctctgcttattgcgcttgccattcttgctgtattacgtcttcacttgtttggcatctcggtcgacaacgagacatccccagtgagtgcccccgaaattgacgggcagcagtacaaatacatacgtcgaaatacctgcaatgacgccctccagtgcgttggatgaaagcaggcccttacgacttcgtctctgctgtgtagcctcaccatgcccttgcggcgtggccgtaatcgtcacattgttcttgtagctagccagcaccacagcaaatgccttcatcgcgtcatcatttagccaggccgagtcgcggaagcaatacagatccgagtacgtcaggtcgaatccgaagccacgcagttcattgtatggccagttctccaatagctcggtaaatgcaccggcacacggagagggaggggcatgagtagcgcttacctcgcggtgaagccacgagcaacaaattacagcatcacgacatgtagcttgtaggttccacaaccacttcatcgactccacttggtcacgcgtgaactggccgaccttaggaatagccgccacgtaacaatcgccgcctgcagcggctttgccctcactgtctagctcgatctgttcgttcttcgcaaggccgccgagaatttgctccagcgcgctgtcaactacagactccagtagccgaaaccggactgtgtccgggacgaattcagcgtcgacgcgccactcaatgggtttgccttgcccttgagactccacttgcaacgtagccaggaaggaccctacctcacgatcaccggctttaacatcgtgaagtgtagccaccacttcacacacatctttttcgcgtaataaaatccgtagggttgtgccattgttgtactccttcaaagccttttttgccttttccttctgcgctgcacaaatggatctcgttcatgcagttgtgaagtgttttgtttgttgatctactgaacttttttttcattctattgatgagtgatcaaggcgataactacacaacggttcgcaactatcgccatcttgacaactcatctggccgatgctgctgaagaatgcactcgtacttcgaagaactgcgttgaaagtcaccaacgtccagcgaatcattttatcaaatgacgatctccatgcaatatgtggtcataaacgcgatacgcaagttcagttaaccgctgcaaactcatcgtataccttacattacacgtagaattgtcgtgggttcaattaagaccgacgtttcatgttcacagagacgaattgctagactacgtatcgccttcgccttcccgcaatttacggattacgtgaggataacggtaaacgcaaaccgtatccatactgcacccggaagatggtttcaggtccacgcaccagccacgaacagatttacctctgtcaccaccgtcaatggtttggtgctagctcacgtgtcggtaggcccgctagataaacaattgcctgcatcatcttgctggctcgtaagcacgcatggaactaatcagaccaccactgggacgtaagcaaccgtagcattgacctcaattaggagctcagactttattttgacggctcaagtttacacccgctcgatccagcagacaagatggtggagaccaacgtgaaggtgtacattgcctgcagctccgtgctgtacctcaagttcctgctcgtgacgttcatccaaggccccaagtccttcaagtcgggcagtcgtccgcccgaggacgcccagctgccgatggccgaaggtcgcgagatggactacggactggtcgagaccaaggacaaggcggtggccaaagcgcgcgaggaagtccatcgctggcagcgcatcatcgcgaacgacctcgaatcgatccccttcgcgctcttcgtcttcggtggcggcatcctggccgacagcaacgacgccgtgcatgcgagcgcgctgatcgtgtatgtacgcgaacgcgatccagccccaccgatcgaactgctggttcgtcggcgttgctgcgacgctggtcggcgtggtcaacgccatcgtggccatcgtgtaagttagaaagaagagagacgctactctcacagactcgactcgactctagcagctcagtcaatggccaaccacaataatgcagagctcacaatgtatgtctcactcgtgttattcagcaatgtatctctctactgagctcacaggatggcggcgacagcgttgccgagaccgaccagcgtggccaccacgcccacgccccagcaaatcgcgcggtgcggctgcatggcgtgcgcgtacacgtacgtgtgcaggcagcgggccaccgtgtagacggtcatggcgccggcgtgcaccgtcgggttgctgccgaccaggatgccgccgccgaacacgaagagcgcgaaggggatcgactcgaggtcgttgctcacgatgcgcgtccagcggtgctcggcctcgcgggccttgagcgtcttctcgtcgtccgtcttgtccaggccgtacgtctgcttgcggccctggccgatagtcttggccaggctcaggccggcgtcctcaggcgggcggccgcccgagcggaacttcttgccgccctgcacgcccgtggccagcaggaacttgaggtacagcacggacgtgcaggcgatgtagaccttgacgttgctctcgaccatggtgctcgctggactcttgatctctcctgggcgatttcggatgtgacctacctgccacgcacgacacggattccgacggctgacaggacgaagccgccggagtttacaaagacgtgaggactgatcggcaaagcctgtcacagagctccggaccgcaacgtggggccagcatagggagcagtatattgatggttgaagctgctctacgactccaaagctatcagttaaggatggcgacggcggcgttgccgacaccaaccagtgtggcgagcacgccgacggcccagcagatcgcgcggtgcggctgcatggcgtgaacgtacacgtacgagtgcaggcagcgggccacggtgtagatgatcatggcgctggtgtgcacgaccgggttgctgtcggcgaggatgccgccgccaaagatgaagagcgcgaacgggatcgactccaggtcgttggcgatcacgcgccgccagcggtactcctcttcgcgcgccatgaggacaacttgaggtacagcacggagctgcacgccacgtacaccttcacgttgccgtccaccatgaagcttttgtcttgcgctgaggggtactgttgagcctggatccggcgggatggagaatgagcgaggcggccttcaagaccgtctagagcacaaccaagtccttgacgcggccgtgtcaatatccacacacagcaacgacgatttgctgtccgacgtttacttgacatggatacaaggcttccaggctcgcggccccaaggcacggatggatacgacacgcgtgaactggattgaactgatgatactgctgcttaatgcctagctacgcctgctgtctaggacgagaaggcaccgtagagcgcgttgccggcgcccgtggtgatgaagatgacgccgaacagccagcagagcgcgcggtgcgggtgcatggcgttggcgtaggccaccgtgtggaagcagcgcaccgccgtgtagccgaccatggcgccgatctgcacggccgggttgcccttggccatcacgccggcgccgaagacgacgagcgccagcgggatggactcgaggtcgttctgcacgatgcgccgccagcgcagctccgtgagcttggcctgctgcagcttctcgctctcctccttggtggcgttgggcgacgtgacgaggccgtagttctgcaccgggttgcccttggccagcggcagcttcttgtcctcaggcgggcggccgccggcctcgaaggtcttagtggcctggatgcccgtggccagcacgaacttgacgtacagcacggcggcgcacgtcacgtaggtcttgagctcggtggaggccgacatggtgcggcttctgttgctgctggtggtgctactgcagctggaggtgaaagacggaatgagtgactgctgttgcgattgcagcgtcggtggcgtagcaatcacgcgaatccggtcaccatctcgaacgctgcggagaccgaggacctgatggcgtgaatcacttgtccgtcatttgacctatcccagcgtaacccaacgtcaacttaatcgggagatagccggaccgatttttaatctcctggaccgcttcaaggtggacgatgaagacaggatagcaagcaacggagaccaaagcaccacagtttgtacatatactgtactgttgttcttaacgctagctacttgactgcagtctaactgaagacgccgaccgtggagttgacggcgctgacgatgatcatgagcacgccgatgcgccagcaccacgcgcggtggggctgcagcgagttggcgtacgcgtacgtgtggaagcagcgcacgaacgtgtagatgcccaagcaaatgacgaacagctccttgttgccgccggcaaagacgcctccgatgaacaccagcagcgccagcgggatcgactcgaggtcgttctggatgatgcgcttccagcggtgctcgatctcgcgcgccttcatgagctcggcgtcgttcgtgtcgctgaacagtccgtagttctgctcgcgtcggccctgcgcaagagccaagttcttgtcctcaggcggtcggcagccggcgtcgaacgtctttgtggcctggatacccgtcgcaatgacgaacttgaggtagaggatgagggagcacaccacgtaggccttcaattcggtagatccgctcatggtggacgggttgttccgggggtatgcgctctacggcgttaaacgtcttgtgtcgattcattccgctacgtcagacctgtagccatcttgaagtgtttacgttaaaacctctattttatccaatcgcagagcaagttacgtcaacagataacctcccgttaaagttgatgggtacaggttcaacatggtccgacagatccgaggcccgatgccgctaccgaatgtctggttgccgctgcaactgctgggcgcttgactgacgtagtttagggtatttgtcagcgcagaagatcacggcgctctggtctttccctgcaacctgcgtgcgtgaagcagactcacgtgagttgaaggcgacataaaattagctcggttttactcagctcggggtcgtaaacctaatgctcctacgcgtacacgcccacgacggcgttgacggcgcccaccacgatggccacgacgcccagacgccagcaccaagctcggtgcggctgcagcttgttggcgtacgcgatcgtgtggaagcagcgcagcgccgtgtacgtcgccatggctccgatctgcaccgtcgggttgatgcggtcctcgatggccacgccaatgccgaacaccaccagagccagcgggatggactccaggtcgttctgcacgatgcggcgccagcggtgctccacctcgcgggccttgaggatcttctcgtccttctcggcctcggggtccatgccgtaggtctgcttggggtggcccctggccagcggcaggctcttgtcctcgggcgcgcggccgccggcctcgaacgtcttcttggcttggatcatggtcacgcgcaggaacttgaggtacaacacgctcgtgcacaccacgtacgtctgcagcaccgaggagcccattgctgtgttgtatcagttggcagttgaagcggcttgtgctggacgaggacgattcggaaatgatgcgccaaagttgccttttgtacccgttgtaaccaggttatatgtacccatgtaaccaggctatgtaccccaagtgtaacccgcaaaacccaacgtggcacgattatggagctgctgggtctgttgctacgtctcgcggcagcgctgctcctggtggccgtgctgctcgcacttcgagtctggcacgtggtcgtgcctcagcgcgtcaaggcgagcgtggccagctactcgaagccgctgttccaccaccagaacgcggccaaaagcaggaatgccaaggctgctgagcgtcagatccgtgtcatggcggtgctgggctccgggggccacactacggagctgctgaagctcatgaagaggctcaagagggaggtctacacgcccatcacgttcgtggtggccgagaccgacaagaccagccaggccaagaccgaactggactggaagccgacggagaccgactcgttcgccatcatcccgcgcagtcgagaggtgcgcggctgcagtacaatgcagagcggaggctgcaatggctgcaaagttgttgattgtttgtgtgcattgtgctcgtgtggcaacaggttggacagtcgtggtcgtctacggtgtggactacgctgcggtcgttccagtcgtgtctcggtttagtctacaatcggcgtccgcagttggtgctgtgcaatggacctggtacggaagttctgaacgctgagtggggtgtccctgagggtttgaagctcatttaggtgttgctctcgcaggcacttgcatcccgatctgtgcggcggtgctgctgttccgcgttttgggcattcagagcgactcaaagattgtgttttgcgagagcttcgctcgcgtgcagcacttgtcgctcactggcaagctgctctactacgtggccgacgagttcgttgtgcagtggccccagctgcaagccaagtacccgcgcacgaagcacctgggcgtcatttgctagagaaaccgcgaagacgaaaatgcgtcaggatgggccgctgccgcggtctgtaccagctaaatacatttagattgtggttttgtcgttacacttcagcgagggcgctgcaggctgctgcacgcggtcaagcggcctagcgatgcaaggtcatactggactgcatgctcacttgcgcatcctgacgtttaatattttactgcagtactcttcgttattactaatattgcgaacttcgatcaatacggcaaccaagttgttcaattcgtatccaccatcaatgtactgaagatttgttatcttcgttgacacattcgtcgtggggtcgcgagtaccgctctcgcgtctgtccaaatccattgtccgagtcgctctctttcctcctctccgtcgtcatgcacgcgtccgtgggccgcgtcggctcgtcctcaggctcgctgggctccagctccgccaacgtcggcttcaaggcgccctccaccgccgtcgagcgggtacaaacccaatagaaatctgctatcggagctgctcaatcgcactaacgttattgttgttattgtggcgcaggtgatgaccgtggcggccacgcagatgagctgcggcaaccctgaggagaacatcaagaaggccgagagcctcgtgcgcatcgccagctcccgcggcgcgcaggtcattctgctgcaggagctgttccagttctcgtacttccccatcgagctcaacgccggcaacttccagctggccacgacgctcgaggagtcggcgctggtgcagggcatggcgctgctggccaaggagctgcacgtggtcatccccatcagcttcttcgagcgctacaagaactcgtactacaactcgtgcgccgtgatcgacgccgacggaaccgtgctgggcgtgacgcgcaagatgcacatcggaggtacggtggttgcggtgccagtgcaattgatcccatggactaacttggctgacgaaatgcctgggcagaccgtcttggatacaatgagaagtattatttcacgccgtcggacgactccttcaaagtgtggaacacagtgagtagatcgataacagcagcggggagatggctcttgtcgtttgagggcgctaatttgtgtttgtgttatttcagcgctacggcaagattggcgtggctatcggctcggaccagtggtacccggaggtggcgcgcagcttggtggtgcagggcgcggagttgctgctgtacccgagtgcgatgggcagcaaccagtacgacccgaacttcgacccgcgtgaccagtggcagcgcgtgatgcagggccatgcggcggccaacatggtgcccgttatttgctccaaccgcgtgggcagtgaggtggtggacggtattcaggtcacattcgtcggctcctcgttcatcacaggccagaccggcgaaatggtgcgcaatgtgttgctatactagagtatgatacgagtccttgctaacgttctcaacgtattaccttgcttgtttcttgcttgcatcagctcaagatcgctgaccgcgagtctgaaggcgtgctcgtggagagctttgacctcgaaaagttccacgtccgacgagccagctggggccttatccgcgaccgccggcccaacatgtacggcgctctcatgacgcgtgacgggccgcagtaaagctcttcgaaataccacgccttcacgagggggtacggcattttgagcttcgagggttgcaactcagcgaacaagtcctaccgatccacagaagcttagaaagcaggtgctggcctgccaagccatgtcatgtcgtcgacgtatcgtccggcacgcagcaacatccaagacaacacaagcaaaggtagccctctaaatgtagctctgtgccaaacttgaccctgttcgccttgtgtattttaagttgaagtgatcccagacacccaccgtctcctgcaggtcagttggcattctcctgccagtccgacatcgacactctcgaagacatgagcgccagagttacgatgggacccacacctggtattggccatcgaagcaacgccttgacggctagccggcttcgcgaaaagctggcagctcggaatggcccaagacactcggtgtactgggtgcaacccaagaggggcgagacccagctaccgagctacgcgaacgtgatggaggccaccaacatggctgcgtctgccaagaagatcgagtatacgctgctgggcaagtacactggcgactggaaggacggccagaagcatggctacggcgcgctcatgtacgcgaacggcaacaagtacgagggcgagtgggtggagaacaagcggcaggggcgtggcgtgtactgggtcgaggagaagaagctgcgcaagcaatacgctggtgaatggttcaacgaccatcgtcacggacgtggtacgtccttccacgaagatggcggcaagtacgagggtcaatggctcaacaacaagcggcacggacatggacgcatgatctacggcgaggaccagtctgtctacgacggggagtgggtgcgtaacgagcgctccggacgcggctcgctagtgctgggtaagtcaagtcgagctgaggtggttgttgtcctccagaatgatgactcactaacgggtgagctctgcaacagcgaatggcgatcggtacgagggtcactggctcaacgacaagaaggaaggccccggtcggtacttctacaaggcgacacgcaagatgtacgaaggcgagtgggtcgacgacgcccccaagtgcggaacctaccacgatgacacggagttccgcatgcacgacgacgatctcgacgacaacgagagccacaacacgttccagctgccagaggtaagtccaatgctgctgtaacagcttcaagaacgtgacccctctgacgttgctgctgtcgatctgtagctggagctcgcccaccctgagcaagttctgagtgagggcgtggccggcatccgccaggaccgcgtgcgggaccgagctttccatgacgacgaagaaaacgaggacgcagttgatgaggagcctcgacgcagcgcaatgactgcaacggacctcgatccgggcgtcgtcgtgttcgacgagcagatgctgcgtgcgatccagagcgagttcgctgctctgctggcggagcagagcgcggcgatggccgagagtccggacaagcagtcgaccaagacccgcagcggctgcatcccttgctcgcgtctacctggtctcatcgacgtgctgcagctcgacgtgagcgaggagcagctcgccgagctgctgcaggagatcggcgccacgcccgacacgctcgtgtcctttgccgagtgcgtcgacatcctgtccctgctcatggagagccaagaggcgccgctgctcgaagaggacgaagacgagtacgacgacgacgccagcaactactgaaacaattaacaagcaaacaaaacacgcactcacagttaaaaagccccctcctgtttcgctgttgccagtccctgtgagtctcttctatctgctcggtgtgtgctgcttacgtgaagcggagccccagcgccgccacgacctcgcggaacttgtgcaggtccttgcggcgcaggtacttgagcagcttccgccgcttctccaccatggcgatcaggcctcgtcgcgagtggtggtccttcttgtgctgctgcgcgtgcgtcgtgcagcgcaggatcttctgcgtgagcacggcgatctgcacctcgctcgagcccgtgtcgcccgggaagcgctggaacgtctcgatggccgtggccacctgcgccttgttcagctcgtgctgcgacgcgttgcgcaggctcagcacggccttgagctgcgccagtgccttctcctcctcgtcgtcctgcggcttcacgtcgtccagcttgagtccgaagcggtagctcttgtccgccgacacgcgcgggggcgcaacgtacgacacgcagcgcgcggcctgcagcagcagcgaaggggtcgccacgcgcgccacggcggcggtggcggcggaggcgcgggcgaggcgggagagcgcgaacatggcggcggccgtccgagtccttccttggtgtcgatgcgtctgtgaggccaggaatggatggagagctattggggtgattcgcgtctgctattgggaggaaattaggatgtgattttgaccaatcaagatggatgatgggagatggctactttggaaatgaacgttgaagttctttgcttttttttgccgtccgtctggcagctttgcgtgcattaccttggtccgcttcgaacgggttcattaaacgatacagcaataaaataatagtcgcgagtcgcagccacgcacgccgaatgtagaataaccaactgcgaagacgttgacagggacgaggagagtagtatggcggcgatggtggctgaggttgggcgacggcctaagagtcgttgtagcgcgagacgaagtcgccgaagcccgggatgatgccgtccgtttccggatccactttaccgtcgatgccaccagtgatgatcttcacgtctgtacgaatgaagaggactgtcagtttggaatgacacgctctgtcgatgatagcagctcacttacttgggaaacggttgctgacgttgacgatcccgtcgccggtcacgaggatcacgaccagcgaaatggttcgttcatcgcagcccacactgcagagcgcctacacaacgacacatgatgagcatctttacacgacataatgccagagagggaaggagctcgctcacctcaatggccttgcactctgcgtcgcctgtgctgcaggtagcagagaagagaagaactcggtggtgaacgatattcgccggcagatccatgtggtccagcagccacgctcgctgtcctcgccgatctatcgcctttgtcacgtgaatggacccttgtggggcatccggctccatttggtggaagagcacgaggaacggaaatccctcggtcccgatggctacgccgcaaaactggtgtttgcgctccaggcctcggtacaagtggccagtgcctgtaattacctccacattctccgtgccaagaacagcgagagcttcttccagcagaatcctacatccattaacgcgcctttagtaaatctgcaagagcgacgttgaagggatcatagtacttacatgatgagacggcctgccacgcgccggaaagtcgctccgttggagcggttgtcgcgcagcattgtcatgagcagcaggattgagttggcgcgcacttcatgtaccatcatgtccacgcctggaggcccaacaaagttttcagcgcgattcctgtgtacacatgagcatacgtcagttcaccatagtagaacacgtaacaataccaacaatgcgggcgtacatttcctgggcagatttgaccagcatgttgtagcgcgagaggatttcgaagcggttctttttgatgtggcagatggctgctctcgtcacgccaaactcccgcgccagagccgcctgcttctctccgttctcgatacgctttataatgttgcgtcggtccgtgtcgcgcaggtacctcacccgcttcttcgctttcttactctcgccggagccgtcgtcttccatatcagcagcgtcgtcatcgtcgtcgttagcagggtcttcgataacgaacggcgcgctctgcgcgttgttgtcctcattctccacgggtctcttcgacgtcggtgttccagcacccgacggcgatttgctcgtcgtaacaggccccaacatcgtcacattcggaacctgcacgggggacgcccgaggaggtcgtggccctggcgacgcagccctctgcaccgaccctgccgacaatggcctcacactggacgccaaagccgacgcagctctcatctgcatctgcgcctgcatctgcagcctctgctggtccacccgcccaatcctgctgcctgcatccacctctgcaagtgggtcaggttctcgaaacctcctctccaatgataaaggagcattcaccctcggcaccatcgacgccaccagttgagaggctggcggagggtacgacggcggccgcaagtgtctggatgcagctgcagcttcaccctgcagttgcatctgccgtcggaactgctgcgcgcgagtgtcaatgacaacgcgttgtctcttggccgggtcctgcacctcgtagccctcctgctgcctgtacgccgtctccgctctcctctgcacctgatgctgttgttgttgttgctgctgctgtctccgctgctgttgctcgaagaactctcgggccagtcgctgcctgtgcgtcaggttgcggtggcgctcgcgcagctccgcgtagaacgcttcgcggtcgtacatggcggccgcgccctcctgctcctgctcctgctcttgctctacgtcgttctcctcatattgctgctggtagcgcgggggctgttgctccggcgcgtaatgcgtgtatcgaggcgcttgacgtcgctgctgcagcgccgcggcgccatccgaccgggcggcgaacgctcggcgtctcgtgtcattagcttcatcggtgtcgttgacgctcaggcgagtggtgttagcgttagcgttggtgcgccactcctgcgcgcgaagcgccgcagctgcctgcgccaagctgcgggccacggacgtgccgccgatgggccgcgggttgggcgggggctgcgccatcgctgagcctaagggggaggtgtccttgggggccttgtaagccttcagccttcgcgtccaggttgcaactcgtggaaatcctgactggctgtgtggcaaatgggcactccgcttctctgggggagtgtatattggtaccttttgctgtgcaaacttgataaatctataaatgacagcatagtgtcttcctgtcaaaagcatcatgagaaatgatgatttcaggttttgatattgtaactgtgaaaggaaatgaaaaatggtacgaagcgtccagtgcggaacaggcgcctactgttgcgtttattcggaatgagcatgtgccagagatgggacagtgggattcaccctctgaaaattcataatattgtgtttttgttttactttttgagtttttttgttttcatgcattttaggctcaagcatcagccgtcgtcagcgccgtttcaagtgattgtgctttcacaagtgacagggttgtgtggcgagtcgatgaaccaactgtcgatgatcgacgtgctgagtgaggatacagcagcactgtttacttggcagggtgacaactgaaagtttcagaacgtgaagggtactagcgtgcatgtaatcagaaggagaatgcagccatttttcttgcggttagcgctggtagcactcagagcaagtgcttaccgtctcgccggcacaaaacgttctgcacaaacttcgatagccgataggccgtcatcttcaatacggacttgtctgccgattcgtagaggttccggcgcgtttatgcctcgtatattcttttgacttcggtaaagcgcgtgtttattgacgctgctggagccgaccgacattcaatggcacgtaaccagcgccaagcacgctccttgcgaacacaccctgttttcgaggcgctttttcgcgtcattttgactcaaaaggactcaattttgctctacggaagcgtgcgaccaatcaaatgcaagttcaaatgggaaacgagctcttttccgagcagcggataccttgggtccaagccaccgccaatagatctcgttcgtccccccagcatgcggcacaatcgaggtaggccgcgacaacgctgctgctgctaccgcaacaccgtcacaggcggtgcctgtatgagcagcagcgtccacgtgtggccgccccgaaaaagggaccgttgcccttcccccatcctgtgcaacacgtatttttgtcgccgagcaaaagcgcaagcctttgcgcctggaacttccacttccactggaagggcgtgcttgctcgccaccaggcaatttgctcgcttgctcgcaagggcaacagagcactgcgtcgcggtgagcccacatcgcaaaacgccgggcattttcggtccaccgtctcacaagcagggatcggttatcatggctacatccgaacgagacacccaggtgtcccacaacatcaccgagcgtcgcactgcgtcaactcaagttgaagccccgcttggctgcaacatgcaggggcagcacgagccaatgggtgagttcatggcactgcacgccgaagccaatggtatcatccgtcagatgtccattgcggcgacaacttcgacgaaggaggctgagctggaggaggagtccaagaccgaggagaacgaggacaacaacgcgccgcacaacaagcccaataagcgcgtgcggtatttgcacgacaccgagcgccacaacatcatcaaacgcattgagaagggcgagaagcaggccgctctggcgcgcgagtacggcgtcacgcgcgcagccatttgccacatcaagaagaaccgcgaggagatcatcacgcgctatgacctgctgattaagcagacgcaggagatcgaccgcgccgagaacttctctggtccgccaggtgaacaattgatggtgcgagagatccgctccagccccgcgctgctgctcatgacgacgttgcgcgacagaagaacgagtccagcggacttccgtcgcgctgctggcaggctgatcatgtaagggcgcaagtcagattggggttgccaacattctgatgattcaactaaccatttgtttgttgctactgcgtacaggctgctgctagaggaggcgctctccaccatcagcgcgcgctcgattgaaatgaccacctcgacggggcaccagacgtacggattgcagcgcaccgacgagttctgcggcgtggccgtcggcgcggaagggttcccgttcctggtactattccatcagatggagccagacgcaccgcaaggctctatccacattggtctggaaacgcgtcagcaggggcagagcgactggcgtttggagcacgtggacttgccgagcgacatcacgcggtacaggatactgctcttcagttcgacggtgaacacgggtggcggcgagtgcaaggccattgaggcgctgtgcagtttgggcgtggaggagagccgcatcactctcgtgattatcctgtgctccacggacagcctcgtgactatctgcggccgcttcccaggtacgcagctcggtgttacaaaggaagggagggaggggccactgatctcacgtgcttcggtcatgtcatgcaggtgtgcagattatcacgagtgctatcgacagcaaggtcgattcagcgacacaggtgattatcccaggcatgggtgacttcatggcgaggtataacggagactaagcagcagcaggaaatgatctacgagtacgtgggtctgtctacccacacatgtccacggcgattggacgcaaaggccattaatattattgcctccaagtgtaaaattatggcaaagttcttgttattttattatttaaaacttacgaagttgaagtgaggtcataattacgctggaagtgcagatggcggcgctgccagcgtccgcactgcgttcaatatccaaatcattgaagaccgatgaggtgtatggggcacggcttcgcaactgtcagtaagtagaaagtattttagccaatgagagcattatgtgattgggaacctttgagttgagttgattcgctgaaaacactggggggtatgataacccggttatcatgctcctattcgacggatttgttttggcgaatcgaatcaaaccttcgcctacttaatcagccaatcaactggattctttgtgcccaactcaaacttccctctttttgccagcaggtttcagcggagagagacgggccccagtgaaaacagacaatacatttgaagcgatctgattggtcgaaaaacctactccaaacatcgataacccctatttgaagcgatctgattagtcgaaaggcctactccaaacatactttctattataaccgtgataacacctactaaaacaatttcgaaggcgaaacggagtacaaacaacctcggaaaataatcagcccttgttttcagttggaaggggtgaagctagcttatatttatcgggggtagggctttttcgggcaccggttttagtggggttatgcctgtattttcaagagttttaatcgagcttagcagaaaaacgcaattgatgttctgaatggactatcctcctaataaaggacttatgaatctgcacgaaagtacgttagtgcactttcaaccactgcacgaatcagccctaaccgggggcgccgagcaaagtcaacaccactgtcatttgagaggtacgaagcgtcgccccagctggtcttctgaagtacggcgttcctcaccacctcactgccaccgcaaacgcccggtatgctcattactaggtactttgaaagttgcagcgcattacgggcggtgaaatgattgcacaccaatcggacgcaaaatggctcgaagttttccatgcaatgggctgccgacgaaggacatgttgaggtggtgaagtggttatatgaggtatgaccggagcatcgctcaaaggaggtcatagtgactgccatccacaatgacaacgtgcgcatagcgtcttggctcagcagaaagttctccaaagctgaacacactccgaacgacagtttcacaattccgaactcgggtaatatgccggaggcattgcttttcataaggtatacccgagcgtgtttcacaccaagcttccttaaccgttctttttatattaaaatatatctttaagatattgcaaaataaaaaagaacatatacggtattttattgagcctttagaatggttcttactgttaaaaaaagcgcgtgttagcagcgtacttgtttatcaactataatacttacgagatataagttattttcactaggtagttcctaaatgaaatatgtacattttaccgcttcgctttatatcacttgacccgtttgcttttgacgtcacagattgctcagtatttatccgatggcgacgttgttgctctcaaaatagtaggtagcgtgaacatgagggttggcgtgtaaaattcttcggtatgagttaataaaagtgtttgttctgggaggttgcatgcataacttctgtgcaatgagttgattttcacaataaaacgggaatcagcaaatctataatctttaaaaaaactcaataataaaaatctcttaagagggacaaacgatcctaatcaagcgaaaacttgagcaggacaaaagagggatcatcggaaatagtagtagtagtagtagtatgatagtgtagaaaagaagcaaagactaaaacgagcaaacattaattgcaaaatatataaaaaaaatagtgaagtgtttttggcgtcttgcactgaaaaaaactactgatgtttgggatggtacgtataagccacactgacaacataaattatgttaatcattgggatcgttaaaaatgttggaacattttaatagctcaaaatcaatatacgacaaagcatttggagttaaacttgattcaccatttaagctgaaagcacatagcagtgtattgaaaacaatagtaaaaaaaagttttacggaaacttgcgatatcagaaaatcatcaaaatataaaggataatgtggggctgataaatacactatttttcctttacgtgcacatgggcactacttaccgcattctgagtaacagtgaccaaacagaaaccgctttatccttaaacaccgcaggcggaacgtactcatgtacacgtcgccttgaagcggatcttcatccacgcgtaccgcttgtacgcgtgggggggttcgaaattaaatacaattacgacgacgatggggacagttgtttcccgaccttcgcgctcagatctaccgaggtaatcggcgccatgtgcttcgctgcgttccccaacccgcacgactgcagcaatggagtctatcaatccacgttagtccatccagctcaccgactttgtaaagttcgctttgactacctacgccggcttcgactctccagtcctcgacgaccaggaccaagccattgcggcgctggatgagccccagctcccggattagctcctgagcgacggccgcagtcaccccgttcgcgctgagtccgctgcgctttcgggcgaccgacgccacgctcccaccgacatcgaccaggacttcgcaacgctggaagttgctggagatctcgactacacagccaacgacaacgacgacagtctccagcacacgtctctggctacgctgcctttcgaccctgtcaaagatgacgaggtgaagaactaccgtcagtccttgcaggaggttgacagcctcctcgggcgcatccaagacatagctgctaacgctgcggctgcaatcgcagagcacttgcctccgcagacccagccacaagtccaagctatagcgcagcgagttatcaagacccgcctgattgccttcacacagaacccggtgttaattgggcaagcatgcagcgctgttttaaccatgccgatttcaaactaaaatgtaatagaccgcacaatgattacttatcatccttgcattggttttaaatgcatcgttcatcgcgagttttaacccttacagtaccggtttgtacgtaaaggtcttgcaggacctgcatgttcagccagtcagcgtagtgtattgagaaaatattggcgaatgggaggcaggcagaaaaggctgggaaattgacgtttgtcaactattcacatcgttttgacaataacgctcgacttggtggtacccagattttggtactcccagtcagtagtccggccgttcacgtccatgctaggccgccccatcaagacggtggacgctcccaggtggacacggacatccgcgcgatgcaagacggcggcatcgtgctgctggagaacgaacgctcctgcaagcaggagaccaagaacgacccaagttccccggactgctggaccacagccccgacgactacattatcgacgcgtttggcatcagctactgcccgcaagcacccacgaaaagcgtggccaaatacaaaggagggtgttgacttctcaagggagtcagtggctcattcggtgctggaaaagtatgtgttgtcgggcctgctgggcatgtgcggcatcgccaaccatcgatggagctgatgaagcgtctgacgatcggtgtgggcttgcgacccagcccagcgtgctgttcctggacgaatcgaccagttgcttggatgcgcactcacccaagctaatcacggatggcgtttgtaaggtggtggacagtggatggacgcgccatcgtgtgcacggttcaccaaccttcgtctgatgtgttttcctgttcggccgcctacggcttcatacgcgtggtggcgagactgtgtttgttggtgaactgggcgagaagtgcgaaaatccggtgaactatctagaagcaatcccaggcacgcagcttcttccagagcgccaaaatccagccacctggtgatcggcgctggcttgaacaacaaggttacgactgattttgtgcagcacttcaagggggtgaggagaagggtatgctagacgcagcgctggagatacccggagtgaaccacccagcccctggggtcccagaaatgatcttcacgaagaagcgcgcgacgagatcgctgacgcagctgtggtttctggtgaagcggctcaacgaccggtactggtgcacaccctcgtacaatatcactcggttcgcgatctcgctgatgcagtcaatcgtctttggtgtctcgccttcatggcgaaggactataagacataccagatcaactcggtggtatgaactttaggacaagctgctcaacggtgttcactggcacacttcctatcgcatctgccgagagcccgggatttcgcgagtgagtatcgcaaagttacaattggttttggtacttcgtgagttcaacggtgagcgtaactcgcctacgtcttcttgattggcaggctcattacacaccgtcttctaccccttcagacttagtctcttctttcgtacagtacaaatgtaattgctaaagagcactgtatctaaggtaatgacaacagcacttatcaaaactgtgagctggccctagggccacgaacaaagttgcaatatacgtagtacgtagtaagataatgcattgcagctgcttcggatggttgattaatcgaagcgtcagcatcgcgagttcggaagacggcgaggaacacgaacacgtagccgaggctgctccagaaatcagaatgcttcatgcggtagtgatcaacgaagttcttcatggtggtgtgactgagagtgaggggcgccttccagctgctagcaggcccgctcgaagccaccattctcgtacaagttacctccagggcgctgttccgttactgcagttagttaaaagggttaaggccagcgcgttgagaatgcccatgatgtacttctgcggagctgtcaggtattacaaccaaaaggctggatgattgaaacccgtaacaacaggtagatcgagtagtagagcacacagaggactggaaccacctctacactcgacagcgcatacatcaagagccggcccacatacgcctgtatcagcatgaagaacaacctcgtgatccagtacattgccccggacgcgtggatcgtgagcccgtgttcatcgaatatcccgttgaggcagtcgagctgatttcggagcaacaagctcaaaatccgcgtcaaaacttcgtgtcaaaccgttttggccccgatgccgcagccttcggcccgcaagaaatacgagcgacaccgcaagtggacgcccgggaaggtataagcccatgcggcaacccgtacgtgaactccgcatcgcagaagtccgcgacacatgcgcgcacccactccactccatcattgctcccctctgtccaccaaaggatgcgtacagtgtgtgcggtcggcaatgggaacttgaatgatttagcctacttctcagtgatccgtctgtcctttgttaaagtggtcgtgtgactacaaactctctttagtggtatcaatgacatcaatatggaagcaaagtacattgtgtcgtgacctcattaccacctacacgcctctattttaccactcaaaaaactttttaacccattttttctgttccttcctaaacgctgacttgacgaacctcgggaggggcttgtatacttcctctgttggttcccatttcacgtccgctgattcgacgccgttcgcgtccgtgatggtcctgataatacggtcaactgggtagaggtccgtcacaagcgagctttctggattctgtggctcgacctcgttcccatgtttcccaatgccgctcttgaggagggttgctgtcgttatcttcttcctgacaccgctcacgtactggtcttctaggactgttgtaatcaccatctccagctcttccgtggtcgttgccttgctcacagcaaacaaaacaatcgcacgggcgacgcaatcattcacgcgtagcccttttaggtggcctttgcagagtctttcacagagcggacgcgaatcatggcggctcactatcatttagggaggttgctgagcgcaaatttaggtatggtggtagtgagttcattcttccgcgacaaaaatgaaacctctgtggacttcaacttgtgtttctctcaatatatatatatatatatatatatatatatcatcgtcctagcaacagaaactgggtgctgctttcgccacagactaccccgtgtcatgagaggaagtggcgctatcttcacatgaacctcggcacgttagtgtttctacatatttttcagctatgagcagccggcaaagttaggcttggccttctcgtgatctcgcacgtgcaacttgccgaaagatggcgagcatacggtattggaacggtcctccagccgtttatacatcaacagcaacagccaacggcgttttgctgttgaaaagacggcgacaacggcaaacaggttgccgtttctacaaattcctggaagttgcttgctctcgggtggagaagcgaggaaaatcagtccaaacgtgcgcttcccaccgcctaacatatacatcgagcaagctgaacgccttcaccaccgagcacacgaacctgcatttgacctgcttgctggggtataactacgattgaagtgtgtcgtgggtggtggtactaatttgtatatgtctatgtaggatggctacatcagcaatctgcatggcctgcacctcaatcgcagtcatatcgcaataccccctttagcctggtgtcgctgggcttacacctgcacggctgcgttgtcgtcaacgagttgatctgtgacgtgatgcaagtggacgccatctcgctgttggagatcgcaagagctggcgccacctgcgatgagtgcagtggcgacgataacggcctgcgacgaccacaacgacccctccagctacacaacacgaaacttccgatgcatattagcctagcacagacatcctagcatcatccaacctaactcattctgcaatacaccaggtgcgaggcaccactacaaggagcaacccgtgcaggatcaacgagtgctcccttcaggttatgagcccaactggctcgccttctgcagcgaccagtgaagacttcgaagactcgcgaggcgacaacgaagaccttgaagaatactcagaggcacgaggtgctaacgaggctgacgaagaccaccaagacggaaggaatactcgcctaggactgccagacgacctgcacttcgacccttcggaccaagagacaatggagcagcacgaccagctccagctcatccttcgactgcagtccgagctggcagaactgaagaagcagctcgcgacgcgagcgccccgttcccctccatgtcggatactagcatggaaaccgcacctccatcaccgaagaagcctaaaatcaaggacgtacgctgctcgaacttcaagggaaacgaggtttaccctgggttaggagctggcttcgagaatttcatccacgagttcgagcatgcaataaggacggaggagctcgtgaacggatccacctggaccgacgacatcaaggcatcggtgattgtcaacttcctcgaggggaaagcgtctaggtactatcacaagaagaactcagagtggctgcgccgtcataatggtgacagcatgccatactcagatgtgaagcgcgcgatgcgtgcagagtttggctgtaaactaagccaactcgaactcagcacgaagatgcagtataacaagcgtgaaggcgatacgtggcatgactacctggaatacttgaacttcatcgagagcctcatggaaggtgatcagaccaagatggtcatggaggtgttcggaaacaatgcatgccccgagttagcgcccacgctgttgtcttcagtgcccgacgacgcaagcgattacgttgcggaaaccgatcgcatgaagcgactgctatacaagctgaaaggtgacgggcgcagatgtggtgcgaagcgagatgaacgcaaaaaccgtcatgctgaccgccggaacccgaattcacatggccaccgcagcggaaatcgccacaatgatgatcagcattggcgtaaccagcgaaacaacaacgacaactcggatcgacgtccgcagcagcaaaataacggccaagcctttgccgccgctggtcatcgtggtgaaatacattgccatgtgtgcgggaagcctggtcacaagattttcacgtgtccactcgtggaacaggcaaaacaactaaccaccagaggaagtgcgaacgtagccgctgctgatgatgacgacacatccagagattctgatgatgaaggctatgtctgggtcgctgccgacggtgccgagcgcggcgcttctgccacgagaggaaatgtttggacagtggattcaggagcaactcaccacctttgcatcgaccgtgaccaactttccgcgatagagccagcattcctgtcggtgcgagtggcgaatggagatcttgtcgccgctactgagaagggaaagactgtcatcacgacgatggcagaaggagtgcctcgtactgtcctgctagaaaacgtgtacttcgcaaaaggtattgaccgcaacctgatttcagtggctcaactcaccgctcgaggctacacctgcacctttggtgaggagcagtgtacaattacgaacaagacgggcaagattgttgccgaagtgggtaattcagcctcgactgggctttggtctgttggaattgagcaaggtgcggcctccttcgcagcaatgacgacctctacgcttcagcagtggcatgaacacctggggcacgtgaactaccaggatctggtacgcatgattgacaaaaacctcgttgaaggcatggttgcctctaatcggaaggtggatttctgcatgaactgcgctgaagcgaaacaagctcgacgcgcgaagaacaagcaggatacttctatatctgccccaacggacgaaccgggcgctaccttgtgcgttgacctgaagacggacatgaccccggatcggctcggtcacaaacacattttgaccattgtagaccacgctacgaactacaatcgcgtctacttgctccgcaaaaagagcgacgcggaagggcatttggaggactttgttagcgaatttgagcgacaatacgacaccaaggtgaagatgattcgctccgacggtggtggtgaatttggcagcaccagactcggccgcttcctccgccggggtattctccaccaagaaacggaggcgggcatgtcatcatcaaacggaaaagcagagcgttttcaccggactgtcatggattccgcccgagcgattctctgggcctcggcattgccacagcgattttggggcgatgctgttctgtatgcgagctacattcgcaactatctgccgactcgagcgaacgccgaccatgcgtctcccattgaggccctctccggaaaacgacccagtgtctcgcatatcctcaaattcggctcgaagtgtacgagccacatcgctcatgcaacgaagcgtcagcgaaaaagcgcgctgaaagaggagttgttattggcatcgacttcaagaagaaagcgtaccgtgttctcatcccgcgaaccaaacgtgttatttctacaacacacatccggaacgttgaccgtctggactcgcgagccgtggggcgatacatggacgccgtcgacgcagacaatagcggcgaggaggaggatgctggcgatcaacagtacgaaaccaacaccccacatgacgctaatggtgaggaagcacgggctggtagccctgcagagcagcatcaacttacgtcgcgtgccatccagcgcatctttggcctgaatcgaggtacacgagcactaccacgcgatgactttcggctgccccaatcttttctcgaagagttcgccactccggcatctgtcctgctcactatcgtactcaaggagggtactgcctttgcggtactactagagcgtgacgggatcaaggagccagtaactgtggaggaggcaatgaacagcccgtattggcaggagtggtggcaggcaatcgaagaagagcttcgaccaatatcgaagaacgctacctgggaaattgtggacattcctactgatggaaatctgataagtgcaaaatgggtgttcaagctcaagtttgacaacaaaggcgaattggaacggttcaaagcgcggctggtagcgcgcggcttcactcaaaagtttggcattgacttcgcagagacctttgcgcccgtgctcaagatcgcgagcctgcggttcattgtggccctcgcatctcagtggtatgccgtcattcgacaaggaaacgttcctaacgcatacctgcgagcagacctcgatcgacccatctacatgcgcgcccctgtcggactccaattacccaagggcaaatgcctactgctgcgaaagagtctctacggccttaaacagagcggcaagttgtggaacgacactatacaccgctacttactggaacttggcttcaggaggagccaactcgacccgtgcttgtattttcgttggcatgaaggcaagctaactgtactgggcctctacgtcgatgatgtggtggtcgtcagccagtgtgagggcgattccgactggacgatgcagaagctcgccgaccaatttcagatcaaggacatgggtccagccaagaagtgcttgggaattaacattgagcagagcgactgcggcatctacctccaccagacagccaatattgacggtttgctggcaaagttcggcatggagaatagccgccccgtgactacgccgatggagtcaactcgggacctgaacggagaggacagcgagcccttctacgacactagcatcatgcgggagaccattgggtcactactatggattagcaactgcactcgaccagacatcacgatgcctgtgaacttcctggcgcgtttcgtctcaacgcctacgtcgactcattggactgcagtcaaacgtatcctgctctacttgcgcggctcgcacgagttgaggttgcactttccccggccgcaggcaccccgatacactattgaggcagccatcttcagcgatgcagattgggccgggggcaaggacgcaaagtcgacttcaggaggactgctcaccatcaacgccatgcccatttcgtggtacagcaagaaacaatctacggtcgccctctctacagccgaggctgagtacatcgctggggcgacggcagtgcaggactgcttgtgggtgaagcagctcctgaatgaacttgagctggacggcaaagatgataatatcgacttgtacatcgacaaccagagcgcgatcaagaacatggagaacgacgtgacgactgcacgcatgaagcacatcaacataaaattccacttcatacgcgacgccattcgcaagaaggaggtcagcgtgacctattgccctacgactgagatgaaggccgacattttcacgaagcccctcggcgcaaccctacacgggcgcaacctggccatgatcaagcttatcaacccgcacaacgagaagctgtagactcggatcatcttggtcgaggaggactgttggagatcgcaagagctggcgccacctgcgatgagtgcagtggcgacgataacggcctgcgacgaccacaatgacccctccagctacacaacacgaaactaccgatgcatattagcctagcacagacatcctagcatcatccaatttaactcattctgcaatacaccaggtgcgaggcaccactacaaggagcaacccgtgcaggatcaacgagtgctcccttcactcgctgtcgctgcctgcgactacggctgaactgggcaacgcatgtgactgggctctggtgaaactcagcaggatggctacattcacattttcgtggacgtgctggtctcgggtagtggattgagttagtcctgctgcctgcgctatgattacaattaaagttgctcttgtggctactacgacagtactgttactgagtgagcgcatggcggtggaagtggcctgcatctacaccgagacagcttcgggccttcattgctgtcatcgttgacttgttggcaagcgcacgggcagtgacgcatgggtagtatgagctatcggggctggtccctgtatatgcattgctacttggggataaccgcttgagctgaccgcttgcggctatgcgtagcggttagaccttagtgccaagttgttcgtgagttggtcaatatcgagacgatgtctcccgcgagggtctcgcgcgcgtaacccaatggcgtcaccaccaagcccaaaaaacacaataggctactgccgtaacgagagtggatatcaagccagtattaccattggtgttggtattttggtgctccggcatggctacagctacattgcggtggatccgtgcagcgttcttagtggcctgtggctggcttgggttctgatggacgaatcctatcgtggccacgttggtttgtgagacagcctgtgtctcgcaggccttggccatgcctacgtttgaagtgggggctcttcgggcagtcgctgctttctagttgtatcgatcgcagcgctctggtggcgctctctgtcgtggaggccgccacaatttcgtcaatgcgttcgcctgcaaggtggcggcagtggccgcgggctcctggttgctggcgtacgacgtcacgtggggtggtgcgcgcccgacgctcttgctgcttcgtacggtatcggccactgggctcttgttggtgccggtaggcggcgtgcgggcaggttgtagtgtggatggctttgcaagtttgagaatgaatcagaaaaagcaataggagcaatacggttttcgcactgtcacgggaagcggacgtaatatccgtggcgcaatgatgcaatcaggctgttcatttgcgagttgtaagcgtcgtcttgtaaaatgtattccacatacaatttgtaggagccacatacaaaaacacgagacacatatgaactgggcacatgcggttgtcgcatccatacccaaaaatgaaaccttccccatttttgagcaaggcatacaagccgaaggtaaaatccgcagtgtagcaaacaacagtgcaaacgtgagagtaatcatgccgccaaatattacgccgctcaatgcgttgtcgttctcttattggctgtaaattgccccctccaaagtgatatttgtctcggtacatgctcaccactcatcaaaattctctcgctcgacgctgtgccccctccgacttcttatctataccgctcgctttgcccctcagacctcctcacagaggctagcccttcatgccgacgattgaggaactccaagctgaaaaccagcgtcttcgggatgatcttcaagcctgcgagaacactatcgtggcccgagacgctactatagtcactagagacgccaccatcgctgacctcagagagactaatcgcctcaaggacatccggattacaggcctaattacctcccaccaccgcgagaagatgcttctactcaacggtgtcgaaacccgcctcaaccagctactccaactacaccaacagcttgcgcgccagcttcgtcgttgtgaaaacagagtgaccaccgcgccggctcaggaggacatcgtgcacggattcgctatgacgctttggctgctacgtgaagaaagagcccacgaaatccgctttatcgccgatcaagagagctacgtctcccgacaggtaaccaacgcgaatgcattacttttcaacttcaccgagaccgggaaccctatcgatcttcgtcaaaacctccaacgggtcgccaacgaacgtctacaagcccgtattgcagactatctcgcagtgaacccggtaagttttctgtgttgttatggtttacactactgtctaaaattaatatcacgttgtcagagcaggaatcggaaactcccaatatcgttttccgttgttgccgattgcactgggtcgagaacgacacctttacgctccaagaagttgcggaaatcgtgatcgagctgctaaacgaaactaattctggtttgcatttagcgagattgtacactgagctccattcgcaagtgcagcggttcgttcgagcccaacgctttgccctgtaaaacacgcgatcgataaatgcagtgttccagaattctgcatctaaacttcaaaatatacaattcaaattagacgattgctatgaccttgccgccatttcaaacaggtaaggagttggtactctgtggcacggtcaaactgtccgctcctcgatagtctaggcttcaatgttcttgagtcggcagctccaggttggataacgatgtgatggacttgttctgacgtctacgcgttttgaagggcgcgttttcattttcggcactgcgaatggcctccaaggcgtgcgcgacactatcggtagaggcttgaaacgcatctttgtagtgcatgacgcagaagcaagcaacgtggtaacctcgctggcacttcgtacatccgtatgaagacttggactgaattccccgcaaactacacaagtagaatgtcaacttgccgcttgaattctcatggctgttcggagtcaaagcatgaagtgccggaccttcgaccagcatgttggaaggcgaatcgcatcttggccgttttgatgaagcgcgtttccgttctcgcgaacggcggtatggttctgtgagagattcacataccctccgcttgaactcacgaagggttttgggtgtgtctgccgcctctggggcaacctgcttcagcagcgcaaaggcgttgatgattgacatatccaaagcccaagtgagtaggctcatcgatagtctaacctcttttcgtcgtgcgagtttgttgaccggagctgatcaacacgatcaacgccgttcatcgccaggttgtaggccgctacaactgtaggaaccaaaaatgtagtccgatgcatcacttcggtaccggtccatctccgcatcgggtacaatccatggcaacaagcaatagcttccgggttggttccattcaaaacgcgagcagaaggcgtctgtgccaaatcattggtataaaacaccaccggctttttatccttgaacacaatgaatccagcacacgctacgaacgtcacgcggggtgtaaatgcggcccgtaggtgtcgagggagcttgtattgagctcgtttatgatcggctcttgctttcttggtgtcatcaacgctatccaccgctccgattaactcccatgttcctcgcgctgccgacttgagacgcgaaatagagtccgccacggccgctttgtttaagcgaccagcccagtctcgccggactgcgccaagcatgcggacttctccatccgtcaacgcaagaacggcattggcgagatcatgccgtgtataaaaattgtcgcacacaagcaagcgcctctgcgatggagctggaaagcgttttgtttgatgggctatcatagccatccacagtgcaccggcagcatccgacttaatccgaacatccgcccgacgcagcgtattgtccaacggagttcgcattcttgggaaaagtcgagtgtaccgctgcgcgggcgtagtcggcagcttatttcctgatccattgtcccataggatgtgtacatacagagagccccagcccactacagcgtagaatcgaatcgcaaacttgtctggcttcagtggcatgaaagacttcgctgcactccgagccttggttcgcacaccgttttcgtctagactgctcacaccaaacggaactgctgttgctgcaaacttgcgctggaagtgctctagtaagtggcggctgtgccatagcggatcctgacgagcaagtcggtcagcctccgattccactagagctgcgttctccggtgcaataggtgctgaggccgagttatctccaggtccgactcttgcgttcgcctctgtagcatcgccatctgtagcttctactcctggatcagcacaacttgggtccttgtccgaagatgaagctgtatcctcggtctcggttgcatcaagaggagggtggatttggagcgacccacggatagtttggaacagtgttcggctcattgtcgctttgaaatcgtgatggccttcaaatttcttgtcagaccacagttccttcatatcggttatgggtaccaggctcatagccagctcgagtccaatgaacgcatccagctcctctgcggtaattggagtttcccctttcgccaccaagacagcgtttgtccagatacgccacgccttcttcagtctggtgctcacaaatagaccaaataagcccttttcagcatgcttggtgtaggctcgctcaatctttttgggcttcaacaggtgcaatctgctctcgctggtcagccactgaatgtactgctgggctatctcacttggtgcgatctgctccccttctccctcgtccggatcggtgatattttcccactcggttgcttcccattccatcccacacaacagctccgaaatctccattttcgctcttgcgcagagtatgtgttcttgagctgtaaacttgctccaggagaaagtcaatgcagaaatgagcagcccatgcaaccgctgaccattttctggttggctgagctgcctcaacagtgtaacatatgtccagcaaataccgaatacattcccataagtacggcgtatattttgcatcacgaacgcccaacgtacggatccaccgcaatgtagctgtagccatgccggagcaccaaaataccaacaccaatggtaatactggcttgatatccactctcgttacggcagtagcctattgtgttttttgggcttggtagtgacgccattgggttacgcgcgcgagaccctcgcgggagacatcgtctcgatattgaccaactcacgaacaacttggcactaaggtctaaccgctacgcatagccgcaagcggtcagctcaagcggttatccccaagtagcaatgcatatacagggaccagccccgatagctcatactacccatgcgtcactgcccgtgcgcttgccaacaagtcaacgatgacagcaatgaaggcccgaagctgtctcggtgtagatgcaggccacttccaccgccatgcgctcactcagtaacagtactgtcgtagtagccacaagagcaactttaattgtaatcatagcgcaggcagcaggactaactcaatccactacccgagaccagcacgtccacgaaaatgtgaatgtagccatcctgctgagtttcaccagagcccagtcacatgcgttgcccagttcagccgtagtcgcaggcagcgacagcgagatggcgtccacttgcatcacgtcacagatcaactcgttgacgacaacgcagccgtgcaggtgtgagcccagcgacaccaggctaaagggggtattgcgatatgactgcgattgaggtgcaggccatgcagattgctgatgtagccatcctacatagacatatacaaattagtaccaccacccacgacacacttcaatcgtagttataccccagcaagcaggtcaaatgcaggttcgtgtgctcggtggtgaaggcgttcagcttgctcgatgtatatgttaggcggtgggaagcgcacgtttggactgattttcctcgcttctccacccgagagcaagcaacttccaggaatttgtagaaacggcaacctgtttgccgttgtcgccgtcttttcaacagcaaaacgccgttggctgttgctgttgatgtataaacggctggaggaccgttccaataccgtatgctcgccatctttcggcaagttgcacgtgcgagatcacgagaaggccaagcctaactttgccggctgctcatagctgaaaaatatgtagaaacactaacgtgccgaggttcatgtgaagatagcgccacttcctctcatgacacggggtagtctgtggcgaaagcagcacccagtttctgttgctaggacgatgatatatatatatatatatatatatatattgagagaaacacaagttgaagtccacagaggtttcatttttgtcgcggaagaatgaactcactaccaccatacctaaatttgcgctcagcaacctccctaaatgatagtgagccgccatgattcgcgtccgctctgtgaaagactcttcaaaggccacctaaaagggctacgcgtgaatgattgcgtcgcccgtgcgattgttttgtttgctgtgagcaaggcaacgaccacggaagagctggagatggtgattacaacagtcctacgtgagcggtgtcaggaagaagataacgacagcaaccctcctcaagagcggcattgggaaaaacggcactgaggtctctgtgcaagaatcgaagagtaccgcacctgcttcggaacggattcagttgttcgagattgatcacatcataaatacggaccagtccgggaaaacagcgtttgtagattggaagaattcgactgtgccattcctcacattgcccttgagcaagaagatcgagtttaggctggcacaaatgaccaagacggcttgcaaagaccgaaatcttcgtcgcagactgtaaaatgataatgcatgcgttgctttcagtgtttgtctatgcgtcactttaaagtttcttgtatcgcttacgatttcatgctgtatgtttgcttgattagcattcgtacggaacgaaggtcatcagcacacgctacagaagcgttagcacaattgagtcgaatctcatgctttagtttatgtgacgattatgcgtttaggtagctgtgcgacggcataccacttctaaaggcggctcaacattctacttcaataatgaaacacgagaaagaggttgttgatcttgaagatgttggccataaaaaataggtaacttgataagtaaaatgtaaagaagctgcaaaattaaacagctttgacgttcttcaaaacttgcatggcaaccagagctgcgattgaagcgggcaaatatctaaccatcagttgccaagttgaccatgtcgtcgacgtgagtctgaatcgtgccgagtaggcgagaccgtccgcaatgccgagatcgcttcgccccgtagatcaagtgcttctaccacggacggtggggctcgtcgcttgagatcaattgccgctcgacctggaccataatttagtttcaggcgctcagcgctggcgcaactgtgctggtttgcagctctaagtgcgtggctcggaatgcatccgcatttgcgccgaaattatcgatgtcaccagacgctgctcccgccaagcatgatgagcatgacgagcgcgtacgagaaaaagtcgtccaaggggatgacgtcgtcgttggcgaaatgcatggcgagcacgacccaccacttactggaccatactgaagcgggacttgtagtgcggcccgctgcgtctccatgtagtgcagtctgtccatgttgctgtggtaagtcccgtaggacacgtaggtcagtccgaacgcagataacgcccaggtactggtagctgttgtggccgtggaacgcgtttgccggcaacagactggtcgtatcctacacgaagttgtcaatgatggatcggcttgcgcccacgagaagaccaactagcaagtccgcgttcaagtaggccacggcctcctccttcagcagtttggcgccatcggactcggctgtcttacggccaggtgcgtcgcatcttggcggcttcgggagagtgcgtggcacggagggccaccgctcgagtacaacctctgaaacgttctccgattgtatagactacatccaggttgagcaccagtgcgccgtgccggacaagggcctcgtgctggtaaccaccgagacgcgtgggtttttggcgcggtggaccctagcagtgacgctcatggagatcgtgtgtggtggcccgtgtggcgtgcgaggaagcaccgtttatcacgaacacaaaaatattgtaaactattcagaaacaagctgcaaaaataacaacagtttggaattgtacgagtttgttcagagcatcgacgtgctcggtacggatctaaatgggacctctatgctgcttaccctgctaaccgcaaccattgcacgagaatattggccaatcgtattcaagaaaaagtgagaatataggtctcaacagacctatacgcccttcgagaccgacggtactgtaagggttaatcaacacttctacatgtcgaggttatttatcgcacaaaagatattgtagtacgggataccgtcgctaggcgtatgccttattataatgttcttgtctccaacctcaccattcagaaaatgtattttgaacattttcggacgctctcgtttacgcttgtgactgataatcttatttaaaccaatcgcgcattttattttacacgaaattattgaaataggctaaccaactggataaaagcataaatttggttattagaaggtgtgattcattttgctaaataaaatgtctccgttgaaataatttcgtattatgtctacgtttattccttttcgataaaaaaaactcgattcccggataggtgcgactttgaccgtgatgaacaaaacggagacaaagtaaaaacatagtggttcgcctacatcgagttcgccagaccaagaaccaaatccgaccgtcaagctagatacataatgattactatgcgtcgggtcatgacctcgtcgtgacttggctgctgatacttagatattttaaggggccaatttgatttgagatatatagtatgggtgataataatgctacatttaacttattttaaaatttgcttaaaatagtattcttacaacttgtttgacacagaattcgtctaacacggtaccaaccagtcaaggtcagctatcaagcagcaaataacttaaaatatgtgtggtgctgtcctccacgtcgactgggaactactgttattattatacttcctgaagtaattgtcaggactggcacgatattggtatcccatggcaaaaaacctttttgccttttagaaaaagataccaagttgttcgcgactgttgacacgctagacacgatggaggagagcatggtgctgctgcaggctgtagcgggagtggcgcgcgcggttcggtcgctttacggtcccaacaagctacgcaagcaagtcacgggtaagcggagggtcattcttgataaataataagccactgagtgttttccatgcagacgagctggagcagacgctgttttcggcggacgcgtacacggtggcgagcgcggtgcagagccaaaacgcgggcactgctatcttgcagcaagctttggacgagcagcaaagatcattcggcacggtacgaggctcgcctttgagctgataagatttggctcgactcttaagatgttttggcgggggcgcagggctgtacgacaatgttgaacctgtgtggtgtattagcggaagctgtgatgaagctgcgacaccaaggcctgccagtgtaagggtttttttgctttgcatttcacttgaagtcacggtctctgaattacattggtgtattgctctgatttgcacagtgatatcatccagcaggctttatcttcaatcgagaagacttgtcttagcgtcagtggctttgaaaaatatgttgttgttttctgtatggtgcgatcactaaggctatttgaactttgttggttgctgtagacggccaagctcatgcgggtgtcgacagatgaagcaatcccatcctttcaggagaagacatggcctcatcagcttgcagctttgggtcaacttgtgtccacaaagtgagtttcttgtacctgcaatggaactcgttgtggataaatgctgacgatgtaacgaattcaatctattgtccccccatgaaacagcagcgaggggttaaccgcgtcatcgttggcggtacaagcggtctccatgctagaccccattgaattttgcggtgatgaagatctcgcacttgaagatctcgtcacaacgcacgttctgcttggaggagtcacgtcagctactagctctcaggttcttggaggcgtgttgctcccgatcgcaaactcttcacttcgtcgaagcttacagagtcgaagttccccgcccacgatagtgatcgaaggtggtgtagtggcccttgctggggatctcgaattgagtgacgttgttgcaagctcatcggctccagtaatttttgtccacggcgagatcagctcacaagcgctagatgcatcagcctcagccccaggagctcctctgtgcgtcccggtggcttcgtacaagtcgctgcggctactcgctgagttgggtggggctgaaattattgagtcatgggatgaacttctacccaccgcgattggccgcgagtgtctcgaggtcaaagcgattgatctaaccgtgtcaagaactcaagaagaagacgatgacgagtatgatgaggtggcgtcgttcttcttgcaggttttgttgccctacaccagacaccaactgcatgcttctatcattgtccaaggccccactcgatctctagcaacggagcttcggaatgacacgctcaaagtgatccggcgactgcggaatgtgttgcagtcgggatacatactgcccgggaacgggggattctggtgtgcgtgtgctgcagccgtcaaggaagaagccaaagctctagcgaaatccaaccaagagctaatgagctttgcaattgcgcgcttggcggatccgttgactgaacttggtgtcatcctgcgcgagaattcgggtggttgcgacccaatcaccgtcgaaagtgagtcatttttctcgcgactggcaaacgttcaaatggttcaacaacgctttgcacgcggcgtgcaggatgtcggtgccgacaagctcttttcgcgctactacgacttccgaagcgctgaatacgccgtgcttccacccagcacaacggagccagagagcgaagacggtcgcgtattccacgttgacgagtacaagtccatgggttccgcgatccgaggagcctttcgagtgcttcgacttctgctgagcatcgatcggcaccgtatcaactaggtcaagtcagctatttcagacagttctcgaagctgaggagcgtaataaggcatggatggaggcactattttcaggcagggcccagtaatggttaacctttggtcctcgcagatagatgccgctctcagttttcatttcaagtgcccccgtgacaatggcttctacacgggcggcatcagcaggtgcagtttcctcgaagaaggcaggtatgcctcgacgtcaggctacggcagtgcctctggattattccttcatggggctcacaacactctcaggttggtaatacattacgtatagatactaccgagttgctcacactttcttccatggacttgaatcgcagagatgcagcagcacgaccccgtgagcggcacgaaaaaggctcagcccgttggcagcttggtagcaggttcagctggcaatgacgagctcagctcacccaccagcgtggatgcctcagcttcaattggttccgtccggacggccaagaagcgccaaatgccggtgtcgctgcgtgttaacaacaacaagatctccaacctggacgacatgcacgaggcgctgcgtgctgtgttcgactacccggggatgttgcagtggctggacctttcgggcaacgagctcgagagcattccgcccgacgtcttctccgcgtacccggagctgttcacgctgcatctgcacgggaacctgctgagcaaatactcggacgtggacgcgctggccaagtggctaccacgcttgcactccatcacgctgcacgggaacccgctggaggagaagaagcactaccgcaactacgtcatcgcggccttcccgaacctcaagcagctcaacttcagctccgtcacgcctggagaccgcaccaaggcggaaacctgggcaagcatctacaagaacgctcgagggggcggtagtggccgtcaagacgacgatctgtgagaacttcaagcaacgtttaaacaaacaattaattcaccgatagattcgttcttctggacgagtagtgctgcgcctgtccaagtgatacttcagccacttcaactaactgcttcaactgaagctagccggtccgcgcgagccagtccgaggaggcgttcacgtccgagttggctcctcccccgtgcgacgtcccgaattgcatggcgtgcaagctggtagccatttacccatccagccaacgtgtgaggggctcgactatcgcatagtctcacacggccgtgccgtgcttcctgcaggttctgggtgtaatggttgccttgctcggagtttagagatttaaatcactggcagcagacgcggcattgagaataagacaaacacattggagggtgttcagatgccatgctcagtgcatggcatggcgttgtcctcccttgagatcattgagaagacagggcgtgacattgtcctcccttgagatcattgagacgagagactaagacagataaaggtcgcgctggccagaagttgcacgacgctcgcaatgacttccatatgggtacacttcaacttcaacaaggacactaccgtatttcattaaatattctcaatatacactctgagaggttattgcaacacccctcatttcgaatgccccgtagtcggaatattgagttgccaaaaagagctctccatcttccgcactttgcgccacgattccttcgctcgccgcctgcgtcgcgctcacagccgcgtccctgtacatctcgttcctgcgctcgtggctcaccaaagtcctgctggaggtggcgccgctcttcgagttctttgtgcgcgcaacggtggacgcctacgtggattaaaacgagcgatagagagatccgatagagaggaacgatggacgcgagtctcaaggagaccgagtacgacgtgctgctggtgggcactggcatggtggaggggattctcgcagggtacgtgcaacaagcggttaagcactgcttaaccgtgtctaaccttcgtgcaacactgattttgttgtgttgattggcaaaagggcattggcacgtatcggcaagaaggtgttgcatctggaccaggttcggcaaccttgattgcaacaaaattaccacttgtgaaaggtaaattatacttattggtggtggtgatgttgttgtagaatgactactacggcagcaactacgcgtcgttccctttggcccaattcctgaggtggacgaagaacgagaacattgctcctcgcaacttcggggacgaagacgacaatgataaagtggaaaagaaggttaaggatactgcgacaattgacgaagacaaacagcgggtgttgccgatgaagagctcgttcgagtgccgtctgctggaggaagggttcgccgacgaagccacgaaggaggaattgttgcgtcaatcttcatccttcagcattgacgtgaacccgcgactcatgttgtcgtcggagcagttagtggagattttgatcacctcgggtgtggggaggtacctcgagttcgcggcgattgagcgcacatacgtgcacttccagtcggctgtgtctggcgctaagagtgaagagtctgacacagtgtgggaggtgccgtgctcgaagaaggacgtgttccagagcaagttgctggggatggtggagaagcggcagctgatgaagttcctgcagtttgtggctgactatggtgagacccacattttgcacgaggacgtcaagaccaagaacgaacgcacgctcgctcttggacgcgcactgaagcggcctcagaacaaggcgagccaggcggacggagatgctgagctggagaaatacctcgaccgtccattccaggagctgctggagaagcacttcaagctctcctccaagttgcagcaggttgtcgtgtactgcgtcggtctggccagcttcccagccacaaagaaccagatctcagctcgggaaggactcgaagccgtgtaccgctacgtcgcatccatcgggcgattcacaggcactgccttcttggccccgctctatggcatcagcgagctcgcgcagagcttctgtcggcttagtgctgtgtacggcggtatctacgtactccgcgctccaattgacggcttcgtgttggacactgagacgaatgaacttcgcggtgttcgctgctgtgatggcgatgtgctgcgtacgaagcacgtggtgaccaacggcagctacgtggacaacctccggctcaccactaacagtgaaaagccaactcatacccacggccagattctgcgcggcgtatttgtgctcaagtcgtcattacgtgaaggtatgagtcgtctgatgctcgtcatcccgcccgaagacagcgagtttcagaacccgttcgcgatccaggtcatccagctcgatgtcggagcgtacgcgtgtcccaagggctacttcctcgtgcagatttcgatggtactgccgactgagtggttcgaccaagcagacaagcagcagaacctcgtgcaggccgtgatccgccgtctcatcctgagctcggaggcagaattgcaacagaagaagggcaaggagagcgccgcaatggcggagaccgccgacgaagatgcagtagaagctactactgatgaaggggaggccgcaaccaagccagcctggagcgaccggatcgcctggcgggccatctttactatggaccacctggcttccggtgacgccaaactgctcgaccccagcgcaaaggcgacggacttgccggccaacgcgtgggtgtgcgaaacgtccatggccgaattcgatgctggtgtcgcggatcccgttgagaaaccgcctaccagttgcaacgccgccagcccgctggagatccacctcgagagcgcgagcgccaacgcccgcgccatcttcgaggcgctgtgtcccggcgagccgtttctgcccaagagcgcgagcgccgagcaagccgagcaggaggagcaggagagcgaggaggacgccgtgctccgcgccgcgcagaagctggcacagcagactcagttagcaaaggagcagccaacggatgaaggtgttgccaccgtggtggaagctgagaccaaggacgcaaaagacgaggatgccacgagtgtcgttgctccgaacaccgccgtctccgcaaccatcaaggaggagattcagtgatctggttcgaacaaaagagaacaatgtccggaatgtcatctagctggccataagccgttagctggttggcattgcgtttatatctttttcttagtctcttgcctttcaaacggcctcaagggcggactacacaacactgttgagctgtactagtattgtgcgacctcgtcttattctcactgccgagttctccgcccacaacgccacgccgcgaaagaaatcagcgcctgttgccggtgatttaaatctctcgagtcgcagccccacgcgcgaggcaaccattacacccagagcctgcgggaagcacgcctcgcgtgagaccatgcgatagtcgagcccccacacgctgcaagtggctacggtgcttgcacaccaatacatgtatgggtgtatctgcgcgtgcgggtacgccatgcaattcgggacgtcgcacgggggaggagccaactcggacgtgaactcctccccgcgatctttcggactggctcgcgcggaccggctagttgaagcagttagttgaagtggttgaagtatcacttatagagacggccggacaggcgcagcgcactcgtccaacgccagcgcctgtggttttcgtctgagcttacagtactgtgtgcgtgtgcacggatggatctctgtgtcctccgcttcgtcgacggacgggcgggggagaactggcgagttgactcgcgcaggccagaggatcggccagcgttaaataagacgctgccgcccagagtatcaggtgcacagatacagcagatacagcggagacctacgcttttcatctcggtgatctccgcccgccgtggcctatgaataccacgtggcgcaagccatccggcagcattgcgagcgcccatcacatcgtcgtaagagaggagagaaagttatacatatgccaaggtggacttgcattcttttgctgaccgaccgactttggtgccgccccgccatacctcttcgcgttggcaaaagctgcctcggcgatgcaagaatttccattggcaacctgtggcaatggccgaggtgctgggtgtgcgctgccaatcacacttgctcgtggtgcccgtaagctggaggcgagaccgaggtcgaggccaactcattgcgccgattttgtggtccatccatggccggcgtcgtcgatcgcgagggctccaatttcgaaggaaccacaaggccattaaagccaagtagtagtcaaattttgtggtagcaatttgctaatcataaaatagttttccacttttcaggtcgctaaagtcaggggtcatttttgccgttgatttttccctttctgcgtcgatcgaccgtttcacctcctctctcgaaggtcaaagcgttgcggccggcggagaccgacagtctccgacacacgccgtcaccgacaccagcgccagccagtgcgcgttgcccctgcctgtcggtacactcgagcgcgcgagagccaccttcactttcgagttcacctcgccgcgcgcacgcccgacacggccgcgggtttacgacacacatacccccgtatatcggcagggtgaaaaccgaaaaatccgaaccaaaaaatcgtccgcccatgggcaacaagctcgccgccaggtccggggagcagcgagtggctccttccagcagcagactcctccaccccaagcgccggtcaccggcatcggccggcacgttccgtcacctgctgtcgccctcgtcgccgtcgctgcagcagcccgggccgcacaaacacaagcgccgctcgcgctcgcagagcgaaggcgtgacgagcgactgcggcacggcagtctccaccacggactcgcagctgcctcgcggttcaggctgcagtgacaaagcagggggcatggccccctcgctgccactggaccccaccacggaggaggacgaagcctcgaaactctccaagagctccgcctcgcacactatgagcgagcacgccgcggaccaggcgcgccgcattcgcgaggccgagaagatcttactagaagtggccaaggagtacgcggccaaaagagctgccggcctggtgccgaccaagccggtgccggcacggacgctgctgtgggaggagatggagcgccgcgcccagcgcgtccgggccggcatcggccggcgaggcacctgcctgttcggccgggactcggacgacggcccgtgcggctgtaccaactacaagaagatgaagcagctaccggacggacgggagaacaccggcggcgtctgcgagtgctgccgacacggcgctccgtggcaccgcctcaccggaggcaccatggccgccgtcggaagcggctccgtgagcatgacgcggtcgtcggcaaggtcttcgatgcgctcgcgaggcacgcggagccgcgccagcagtcgcaacagccgcagcggcagcgcgccccagcagacgccgatcgacagctccttgtactcactaggcagcgactactacgacgactatgacgacgagtacgacagtgacgaagatgacgatgaggacgaagacgacgaggacattgccaatgaggtggcaagaccctatggcatgatggacgaccccacgccgccgctcgtacacagccacgcccgaagcgagggcgacgcgctggaccgcagctcgctcttctcgaacggagacagcttcgggctgccgccgcgactctcgagcaccagccgccacctggacaagctgctcggcgcgatcgctaagtatcgcgccatgggcctggacgaagacgagattgagatcaagctccgcgaggagttcccaccgaccgagcggctgtcgtatggaggcggccactcgccccgaccaacgcgcgcgagtcggtgacggagaaaaaatcgagcgagggacggatgccagagactgtgtgaacgtaggcaacattgtaaatgactgtagatagcctggcaagtcgaacgcaaacgcaatagaaaaccctcaagttttggtaggcaaagagccctttggttgattggtgacttctcactgctggcaatcttgagctgggcaaggtttgagtcgtcgacgggataagatactcttgaagtgacacgcttgcccaggatgacgtaacaccaacaagtccacgcccaagtttgacgaaacgttttcttccttctcaccaagcgtattgtcagacaaccatgtcccagcatgcagactccatggtccaggctcaaaaatataaggttgatcgaaacgcctttttcctgctccaaaacgttgacaaaatagccatctcgatcaacccagagtctgggtccgagaccagtggtttgctcagctgcggtgctttcccgtgcgtggccttgtgcacgtatatttccagtgcaatgctgtacttgtccgcttgcaccgggaaacacgcgcatggaccgataagaccgcgcgcccccaaatttgtttgccaacacatgaagtaccacaatgtattactgtaaatgaatctcaataactcagtctctcctcgtcctgctgctaaagggctcggttcgtgccgtgggccgagctctcaacttctgtccgtctgtctacattttgatcttgttctccgagatctccagctcctggttctcgaagatggaggtcacgcgcatgacgactgaccaggtgatggcctggccgggcgccatcctcgtaagtcgcggcagcagacccttccacaatgcaccgacaccctcctccttcgagatgaccttcatggcgtcgaagaatcccttgtacttgagctcctggccggccacggtctcctgcgccatgagccgcgtcttgagcacgtccatgggggtgttgaacatggggccgagcgagccggcgatcaggccgttgatgaacgtggcgtacgtgggcagcgtcttgccgtcaccgtcctgcttgtcccacacgtggtggttgagccacgcaaaggccatgaagttgaaggcctggttgctgccctggcgcgccatggtggggatgttgcccttccagagcgcgcgcacgccctcgttgcgcacgatgtggcgcgtgcagtcgatggggccgctgaagcggccgacgcccacctccttttgcatgcgggtcttgatgacctcgaacggcgtcacgatgatgaccgactcgatgcagccggcgagcagaccggccgtgaagttgatcgtgggggtgatcggcttgtccttgccgccggcgatctgctccttgaaccacgcgaaggagccgaagcgcagcgcgtacttgagcaccatgttggtcacgaagggcgtgagccccttgtagagcgcgaggccgccctcctgcttgtagatggtcgtgccgcagttgaccatgcccttgtactggcccgtgcggtccagctgcaggcgcgtcttggtcacgtccagcggctgcaggatgcaggcctcggccacgccaccggccatgccggccatcatcttgacgtacacgggcacgggccgcttcttgaggtcggcgcccatggcgtccttgagcgcgctggtggccagcagctggtccttgttctgcgtctgcatgttcacgagcggcgtcttgggcgtctgcattgtcccgggcggcgggtgtccagaggtggtgggcgaggtagaacggggcggtgcgcggcagcgtggcaaaaggagaatggccggctcgaggccgcgactgaggtggcggaggacgagtcgagcatgacgccggcgtcggggctttgcttgctcgtcctagactagactcggggggggggggcatactgagcgcaagtcatcggcgcggagggggtcggggttcaatcagaccaactttggaaggtacaatatgatacaacctgaatcagggctggcattaactctggaaggttgtgcagatccatgtcccggctgcgcacttcaacgacgcttttcacggcgaacacgttgcttgcgaggcacctgttgacgtgctggttgtgcgcccgtgtaagattcgcaagcgctttttcggcggtggtggtgttgcgcttcaaggctgaaagctccacagcttacaaatcgggccggatggatggatattgggcgagatgtattaggatggacattgaagaccgaagagcgcggcggaattcgtcaccgagttggattgctactagcccgggggtgatggactaactcgcctgccagcattgcgacagtcggcacaggcagtgctccgaatagctggcgcggatcctgaagcggcagtttctcgtccgtttcgacgtgaaagacgagcagcatggcgccgccgccgcgaatattttctcgtgggcgctaggcgcgcagtagccaccttggccgaccaactgcggcgccaactgctgcgagctccaggctggcgcgcgagacaacttcaaggaagtttcagttctagtccagggacgtgacagcactgcgtcgaccctgcgccctagcgatctaagttgaagcagtagatggctgcttcgacgacagcgagcttacgcaccggaagaactgaaataagcaacatgtctaagcgacatacaaagttccagttggatgccggccaatccaaggctcgagttccagacgttaaaccccgctgacgcgcaaggcacctccgccgaacttcaacgcgagcaagcgactcgcttgagcgtccaagcacgtgatacgacgacgatttgctcccgcgctccaaagcacgaaaggcaaggtctccgctgcactacagcacaccaaagtgcaacaacaacaacaacagcagcagcaagcaacagttctctcaaaccaacgtgggtctcttcattctgctcagggcagttcgatcagtgtgcacgcactcccgacgttaaaccgcgcgtggtcagcatcgtgctcctccttcactgcgtttcccggtgctgcccaccgaaatccctgcctgactcacccactacaagtatcgccactgccgcagcagtcccgttaattgaactcctgggcgtacttctccttggcctgtttctccatgtccgggttcacgcggcccgttgtggggtccgtgcccagcgggcgtcggaataataaaatgtgcggctccggcctgcaacgcagcagcagcaacacaaaacaatagacggggtcaatcaacgctgcttcagatatgaccaagcagacccacagtctgactggtctcagcccacgaagcagctagcgcggacggagcatctcgctgcgtgaacgtacttgtgaatggcgtagtgcacccagccgcggctctgctggacgccgagttggcgccactccgtctcggtcagcaggcggtccggcaggctgcgctgcatctccttgggcaggatcacgtgtctgaattgcagcagaaattgcaacaaattgcagcgaataatttgaatattgttagccatcgatgcgcattcacgcgttgcgaggccgattctgggccaattcccgcggcggaagcgggcgagcgacgcacctgtactcgtgggtgtcgtccacgtacttctccgagtactcgatgcgcgacgacaggtcgtgcgtcatggctgcggcgtctctggaggcggcggcttcgccctcgctgctctctcggtcaatttcgcgctcttctcgatgtcgcactcaataatggcgagttatgtggtgtggcgcacgtaaatagcttcgttcggaattagccgagataaggcgaagtcggtcttgaagggacgcacgcacacgatggataccctcgctgtcacttgcgacttgaagggcgaacgaaggcaagcatgacgcgcgagaatggcaagcagatggagacggacagtaaggtggcggcattgagatcaaaaggatggatggatgatgctggtggttttggctgactgagtgtggctgctgtgctgcccagtggacgagcacggggacatgaagaacgatgcgctggcgcaggcgagcgtggcgctggagcagttcacgcaggagaaggagatcgccaagcacatcaagacgtggatggaggagaagtacggccccacgtggcactgcatcgtcggctccgagtacaagacggccttcacctacgagagcaagaacttcgtgcgattcaacgtcggcaagaagtgcatcacgctcttccgccacccgtagggcgacttggcagtaccaatctcttatcatcttgatgaacatcaaaacacgtgaacgtatcttgcaaatgtttagatttgtttactcgggacagggatggaggggccttacactgccagcaactgtgactaggcttgcgccatcataagcaccgtctcgagcaacgaactcgcctctagtccgcgaaggaacgtcaagcgcctacctcccagcgactgcttagaaggcggcgttgccgggccaccgcgggaacggaatcacgtcacggatgttctcaatgccagtcacgtaacgaatgagacgctcgaagccgagaccgaaaccggcgtgcggcaccgagccgtacttgcgcaggtccaggtaccacttgtagtcctccgggttggcgccagactccctgatgcgagcctccagcacgtccagacgctcctcacgcgccgatccgccgatgatctcaccgacgttgggcaccagcacgtcggcggcagccaccgtcttgccgtcgtcgttcaggcgcatgtagaagctcttgaactccttcgggtagtcgtagatcaccaccggcttcttgtagaccgtctcggtcaggtagcgctcgtgctccgagccgaagtccgtgccccagacgggcttgaccgagaactttcccttcttcaggtgctccggcttgagcagcagctccacggcgtccgtgtacgagatgcgcacgaacggcgactccacggtggcggccagacgctcgagcaggcccttttccacgttcttgttgaagaactcgaggtcctcggtgcagtggtccagcgcgtactgcacgcagaacttgaggtagtcctcggccaggtcgatgtcgtccttgaggtcggcgaaggcgatctccggctcgatcatccagaactcggccaggtggcgcgacgtgttggagttctcggcgcggaacgtggggccgaacgtgtacacgtccgagagggcgcagcagtgggtctcgacgttgagctggcccgagacgctgaggtaggacgggcggtcgaagaagtccttctggtagtcgaccttgttgtccttcgtgagcggcagcttgccgtccgggtgctggctcagcagcgtggtgacgctgaacatctcgccggcgccctcgcagtccgactcggtgatgatgggcgtgtggatgtacaggaagccgcgctggttgaagaactcgtgcgtggcgaaggccatggcgttgcgcacgcgcatggcggcgccgtggatgttggagcgcgggcgcaggtgcgcgtgcgcgcgcaggtgctcgagcgtgtggcgcttcttgctcatggggtacgtggcgctgtcggggatgccgccgtagaccttgaccttggcggccttgacctcgacctcctggcccttggcgggcgacttgaccacgacgccctccacgctgaagctggcgcccacgccgcccgaggcgatggcgtcggcgaagccctcggtctcctccttgttgatcacacactgcacgccggcgaagcacgagccgtcgttgagctccaggaaggcgaaggcgccggcgccggcctcgcgcagggtcttggcccagcccttgacggtcaccatctggccctcgagctccaggccgctgcccagcagctccttgacgcggatgcggttgcggcggaacagcgtcggcgccgtcgtcggcttggcggagggcaccacggcgtccatctcagtcagtcactctacggggggatctgcgcttccggtcgcgttgcgaaatggttgcttggatcggacatggcgggcgtcggcagcgcataagcacgcgtgattggatgataggcggggggatcgagattgcgattggagtaaaatgaactttttcttgtggctcgaggggatggatgcatacaagagatgagctcctcgctgcgccggacgctgcaggtcgtgggcgtgcgcgtggcggccgccaaggccggcaaggtggtcaagcggctgcaaggtcatctgctggatctgccgcgcctgcgcaatgtggtgcctgacccggcgcgcaccgacatgaagctggtgctgctcaaagccgaggcgaaggacgagaatgcgctgaagccgctgcgcgagcggttggcggagttcctgcgcgctgggagcttcagctttgtgccccatgcagtgcaaatcgagtgtagccaagatgcagcatcgcgcaaggcaatagatcagagcgacggagtggacaatgctacggtcaagacgctggccattggcgacgtgtccttccgccccgttgacagtggcaacgtacagcagctacacgacatgaacgagaagctcttccccgtcaagtacggcgacgcgttctatgagtacgtggcgcacgccccggagggatactgcaagctcggtacgctgggaatttatattgactactgtcgagaaggagaaggacgacgcggttgtctaatagtttacgcctatgttgcagcttacggtgctgacggcactgcgatcggatcggtgtgttgcgaggtggagaaggtgaagatctcgggcaagcgccgctatcgcctgtgcatcctgacgatcggcgtgctggaggaataccgacgctcgaagctaggtattcaccacctcttcgtacaatatctctgcatgggttgagggaacactaattaacagtgttactgtgcattgtaggcagcttactgcttgagagcgtgatcgcgcaggcccgcaaggacgggctcgcttacgtgtatctccacgtgcagagcagcaacacggcggcgcagcgcttctacttagcgcgcggcttcgaggtaaccaaggttatgcgcaactactattcgcagctcacgccgccgcactgcttcgtactgcgccggtagctctgagcgggtgtagtgcagtttagccatgtaaacttcaacgaccagaggggtccagtattcgatgcaactcgtgtgcaccacaccaaccgcatgtggccatcaatccgtgcagcagctccgataagcacgtcagcatgctgctggacaaggccctgttcaagaagaccctggaggtcgtgggcgtgcgcgtggaggccaagaagatcgggcgcgtggtcaagaagctgcacggccacctgctgaacctgccgcggctgcgcaacgtggtgccggacccgaccaacccggacccgtacaagaactcgagcagcaagctcatcctgctcaacgccaaggtgaaggacgccgagacgctgcagccgctcaatgaagacctggtgagcttcctgaaggaggagagtctagccttcgtgagccacgccatcgagctggactacgactacttcgccgtggaccaggtgctgagcgagatcctgcccaagggcatggacatccccagctccttcgagacggtgggccacatcgcgcacttgaacctgagggacaaccagttgccgtacaagaacatcatcgggcaggtcattctcgacaagaacgcgcagatccgcacggtcgtcaacaagacggacaacatcgagaccaagttccgcacgttcccgatggaggtgctggctggagatgacgatatggaggtggaggtgcacgagagcaaggccaagttcaagtttaactacgccgaggtctactggaactcgaggctgcagcaggagcacctgcgcatcatccggaccatcaagccgcaggacgtcgtgtgcgatatgatgtgcggcatcggcccgttcgccattcccgtggcgctcaacggcaccaaggtgtacgcgaacgacctgaacccgcgcagctaccactacctgaaggagaacatcgcgatcaacaaggtggagaagctcgtcactccatacaacctggacggccgcgagttcctagccaagctgctgagcgagaagaagcagttcacacaggtgctgatgaacctgccagccatcgcgctcgagttcctggacgccttcccggggcagttcgaccactgggaaggagagctgccctacatccactgctactgtttctccaacgctgaagacgtcaagcaggatgtcaaggaggtaagcgatggacgaacatttggtcgcaatgctgctagttgttgtggttctaacttattgtgcttgcttctgattcacagcgtgccgagaagatcatgggcggcgcgctggacccggagaggacgtcgttccaccttgtgcgcgatgtggcgcccaagaaggtcatggtttgcatttcgttccagctgccggagtcgatcgccttcagctcggagcgtcaggcctcgaagcaggacgaccctaagcggcggaaggtcgaggccgacgccgcggcttgattgtcgtggtctgtagatgcatgtttagacaaggattccacgcagaagcattgaaaatcaatcgtcagtcgtgtgctgttctacatattttaaagctttgggctacggagtgagctgcctgcgcagcacgtagcagtccggcggctcgatgcgtttgtagtagttgcgcaagatctgcgtggcctcgaatccgtgggcaatgtagaaccgcagcgctgccttgttgctcgtttggacatgaaggtacacctgcgccaccccgtcctggatggactgggccacgacaccttcgagaagccggctgcctgcagcacatgaacgtgagcaatgagcttcccctgtactagaacacaaacatctcatctcctaattcctacctattctagcacgccgatagccttccagcacgccgagcgtcatgatgtacgtccgctcaaggccctcgggtcctccttccacaggttctcgcctacagcagatagctccgacagcgaaacctcctccgacgcatgctgaccacacacagtcacagcacattgtcagtaattgaatgcatgcaacaccagcactaccaggccagctcacagctcagcctaccgatctgggcgtaacctggcagagagctcacgacctccttgtagaaggccaggttgtagcgcacggggaagagctgcaggttgagctcgcgcagccgctgcacgttgttcttgtccacggggccgaagacgacgtccattgctgtcgtcacggctgcgactggtctggtcccatcggcgtccgctgcctctttatcacacaagtgcttggacgtcttgcagctcgtggacgcagtcgaggtggagccctgtcgagccatcgatggcagcgagaatcgaggtatgccgctgtcgcgttcgaaacgattcggttgtgctgcgcttctcgtaacggcgcaagttgaagtggaaccgtgtgaccgctcgacgcgatcttccgcagatttggaggtgatggagatctcgcgccactttgagattccctgctgaggatgaagctgttgctgtcgtcgaccatctcctccgctctcgctctcgctctcgtcatctccgtcgtctttgcgtcggacgatctgtcggcgctgcagcaccacgtgagtcccgtgctggaatcgtcgaatttgctggatagcggcgacttcttcgtgtgcaactcgaaagtgcctggaatgaatggccactacgtcttgcagccctcgaacgtggtgcagtcagacccggacacgcccgtgttcttccgggaagacagcgaggacgaagatgaagagtccacagcggtggctctgacctcggacgcaacgacgacggactttcgactgttcaggcacaacggcttctggatgatcgccgacgtggagccctggccgcccgtgacgcacttccgctgcgacccgaccaagacgcagatcttgggcatggacgtcacggaggtctgcggcctggggcagtcgacgccgccgcggatcggctactcgcctgcggaccccaagctcggagacttttcgctggcgctgcatcgccacacctgccaagagctgccgcagatcgagggccaggctggagagaacgcaaggaacaacttctctacgcgcaaggaggagctctaactgcctcaatctgaatcagtttgctttggttttgctgctttattgtgttgctagttccacgtgacggcgaggttctgcttcctgacggcgaagacacaagctagaggcaggtgatcggacggacagtgggcgttgggcagccacgacgacgttctaccgaagacattggggaggatcggggcgcaccaagtccccatgtagcgcgtggtggcgtatcggtccgtcgccttggcgtcttccgccacgctgtcgtgccagtcttcgggcttgtgcttcacccactcgacatccacgacgctcacgggctcgcgctcgtcttggccgactgcctcgagctcttctagcgtcggtaactggagcagttggaacggcgtgagctggcccgtggagtggaagatgtagtcgatcgtgccctggaagttcttgctggagaacgtgagctcgggctcgctcatgtactcggcgtatgctccgtaggcgctctccatcatctcgctgtggacgagcaagctgtcacggtcagctcggggctgcagagtcgcgtatcgcttcgcctcggcacgctggtcgctaccgctaacactgcgatcaatagcagacaatagcggacggggacacacgtccacgttgacaaccggtttgctctgcttcgcttcgctggtgtagcgtggcgtacgacccgatccgaacgagatgtcgtaggccttgacgtctggagggatgtctggagcaaggtacaaaggcttctcggccgagtctgcagagctcggagccctcctcttgtaagcagcgtgctctagcgtgctctccggggcggatggctgactccaatgaccccagccgtgctcgttgcgcgccatgactcggaactggtacgtcatgttggcgctcaatgacgccaccacgaacgacttggccgctccgtccgggaccgacagctcgtacaggaagcccgacgtcttgctcgcgcagttcttgactgcgactttgtattccagaaccggagccgacgatgtcagcgacgttacggacggctgaggcggctgccagttgactctcagtgatgaagccgtgggctcatcgacctctggacgacttggagctgctggagcctcgggaacgggtcgccgacggcccgtgaggattgtatggtagacgtcgctgctcggggtggcgttgaacgtccctgccagcacgatggggagctggaaatctgcgttaaacacagcaacttggcggcacaagtactcggtttgcagcacccgaacgcgctccatctcgggtgtcgcccccgctgcaagctgtgtgttcgctacacagagcgcagagggcagagccgacgtttcccacggctgcagactcaccagcagcgcgagcttgtcctgcttcgccctcgccgcaagattcggatcgttgatgttggcgcacaggtcgttcaaatgcacctcgctcgaccggaagagctggaaggtgctcttccggaacgccgtgacgaggccctcatcgatctctttggccaccgcagccgagctcggcgccgcagacgtcgcgtagatgctgtcgtagccagccgtggccaactccaccgcccaccagtcgtcgtactcatccacttcctgcgcagcaacaagaatgtaatgataggttggcatgttgaagtgcacggatgacggtgacggcttacctgaaggcacatgatgtcggcgtcgtacgacaaaatctctctgttgcagttgcaacacagtgattaataggcaacggtctcatacacacgctcgcagccatcactaccgtagcactcgatctcgtcgttgtcggatgttgaggatcgctgcactgacgtagctcttgcctccgcgctgcatccgccgagcacccatttgcgacagcacattgtacgtgagcaccgacaccttctcgaggtcggctagctcgcccagctccgctagatcctgcttggccggcacgaacgctcggaacgggagctcttcttccggcgtcgtcaaagacatcccggtcggtcgagacatcggtatggctacactcgcacatggctacaaaatgacttcagaaccggtagttgctaccgtttgaccggtacggagtcgcccattgctacctgaatcagctcaaaatggtgcgttccagctctcgtcgtggacgtccacggccctgtatcttcgcgcgcaggggctctttctcctcccaaacaccgccatcatctccgccactatcccttgtataactaagctaaatatcacgcgcaggacgccggcgcactgcgagctgtgagcggccagaccggcacgctggtgctggacatccagggccaagtgctgtccgccacgggcgagctgcgcggcacctccggcgagatcgcggccgagaccatctactccatgctgcaggactcgggcagcgtgctggatgccagccagaaggaggagctgcagcgcatgaccagtaagggcctgagactcttaaaagagcttctcaactgtggagccacttgcgaggatgttacgctaactgtgtgtatttccttattgcagtcacgttcccgacgtacgactacgtcgtgacgctggatgccgagcaggtctacgtcgtcaagcgcagcactgtgcaggaataaagagacaagagcgagaaaatgtaatgcacgggaaggtgaagccatattgcgtgggggtaattgcattcttcattaggtggtggatgagtgataaagtgtatacacgcggggcgagttttgcttgaaggaggtgaggacatttactcgtcctccaacgccagcttctctttgaggagctgtttgtatcgggcctcgcgctcgtggagctcctgctgacgctggcgacgacggtactcttccttctcctgccgacgtcgcttctcagcgttgcgcgccgcgaggaggtccattttgcggtgcgagttggtcttctcgaggtccagcagcgccttcagccgcttctcctcgtcgatgatggcgcgcttctcgcggcgcagcagctccagatctggcgtctcggtgagtgctttcaggatgacctcgctcttggctgctttggctcgcttctccagctcccgcgagcgacgtgcgcgctccatcatgcggaggcgatgctcctcgtccagacgttcgttgtcggccacaaggttcacgtggaacggggagcgcgccgtcttctgcgtccacttgtccaagtgctggcgacgcgcgcggatcttgttcaagcgccgagtgcgctcctcctgctccagcgccagccgcacctggtcgcgctccatgtacttcttggattggatggcggcggagtccgagtacggcatggggccatcgtcgaagtcgcggtcgaaggacgcggtggagcgggaggctgccgacgacgccgaccggctgagaggtcgacggtagtcctcctcttcctgctggtagctctcgtcattgtcttggccgctgccctcgtcgtagccctcttcccgctgctggtcctcctcgtcctcgtcctcgtcgaacttgagcgcctgcacgaagcgttcttctgccataccaaacgcaaccaaccactgtcagtctttactgcgcatattcaagccgcaaccagctataacgcaccgagctcctcctgctgcgccggcatcgctatcgttatcgttagctcttgctgggaagcttcaatgtgtccgtccgcgcaacatggctacacccgtcttctatttatagtccgacaaaaccttgtctcggcggcggcgcaaaggcgtcgactgcgtccgctacagggcacgcggatgcacctcgccggtcgtcccaaaacgctgagattgcggcggttccaaccgtaccctccacgccgtcgtacgtgctgtctgagcagcggcgaagcgagttattgctgaggtcggtgtacttccaccaaaaaagtaagaggccccaccaaagataatatctggtccaccaaaaatacctgtgcgaagcacacgcgttgtcaagtaggagtgtccacccgtagagagtgcctattacgtaccatccgcagcatgtgtgctatcatcatagagcctgaagtctatagcaagataatgtagactgagtggttctcacaggtgcgccggacgcgcacggtgcgtactcccgtactaaaatcgagcttctaagcacgtacagtcgctcgaagggtgatcacgctaaggacattgtagaccaccatgatcaccacggagctggcgaacaggtattgtgcctttctggcaaaacgccctccgagttgaggtcctacgtaggacttttgctcctacgtacgaagacctcataaaagttagtactagggccagtaaaaccatgcataagccaaaacggaatgtaaactgagcgaatggcttgcaaaggtaggccgacaagtgagcgcgttcagtaccgctatacctgtagcgcacgtacgtagctccacgctgtgcacggtgacctggttgcggtctccgcctgtacgaatccggccaaactatgcatttgtcacagatgctttcaggcgcactggcctgatctagtcctacgaaggactcgttagtcctacgaaggctcaaatggccagcttaacatggccattcggtccttatttccaaaaaggtaccctttagatgaagacagagctcctacgtaggacttccgtaatccgatgccaggccaacagcaaatcctaagtctagccctaccctctccttcttaagactaactttttgaggtcagattggccaaagtttcggaaaggcacaatatctccatgcgagcttcatcatagttgcacgtacaaaagtgtcggacgcatatattttttatcactggtatgatcaatcggacctcgcatcccacctcggagtgaatcggaccctactcgaccaaatgatcgtctatgctgatgatgcagactttgtctgccgcgataccgagctggtccagcgcatccaagccgaagcaccagcacgctggtccctccagatgaatgcaaccaagacagaactaaccatgattcagcgatgtacaggctcgtcgggctactcccgacacgctcgggcgacagaagaggcgtggcgctccacacagaagcttggcagtctactcggcgactcagaagatctgacacgacgcaaaatactcgcagcaggcgcgctacgtcggctctggacaatatggatccggccccagtacgtcagtgacgccaccagagtccggctgtataactgctatgtgcttcctgttctgctgtacaacagcggaacttgggcactgacgccgtccgagctgagcgggctcgaaagcttccaccgccgacaactacgtagcgtactaaacattcgctaccctcagcgaatctctaacgccacgctctacgaaatctgtcaggaacgcccgctccgccacagaatcacagcagcacgatggcgtctgttcggccacatcctgcgccggcccgagatcccagcgtacacccagatggccgcctacttcgactcgtcgtccgagggaacctggcgtggacgcccacgcatgacactaccgactgtgctcgatgcggaccttatctcgagcggatacgcctatcgcctcgagacccgccgtgacctggaccaacttcggctgcttgcacaagagaaacctaaatggaaagccctcgagagggcaattgtcgccgcactgccggcgaagaaggacccgacgtatgcggacaccaccttatgccgtcgactagcaaagctgagcctagcgacagcatagcgtggcaacgagaaaacgtaatactttacattatgatcaatcgatcagtactggtcagtttagacccatgtaggagcaatatctgttggatacatttccacggtaaaaccccatgacattggcagtaagagatcgcgttcagctatcttaatttcagggacaagccgtcgtccatcttggccatctgccgtacaacagcgagagccacgagttgcccgtgtctcgcgcgtgacgattatctccttgctcagcacctgctcccactcctccctgacgaactgcttggtgcgcacgaactcggtgacggccgacacggggttcatctggatgccgtggatgcagtacttctcagcgctgaaccacgtggcgttgtccaccttgttgtcgaagaagatgcccgtgaccttgttggggcggaagttggtcgggtggatctggttggcgtcctcgatgtagaagttcgtcttgatggcgtgcgcgttgacgcgcgtcatgagcttgccgacgaccgtgagcgccgcgttgttggtcgccttaccgaacatgtacatgccgaaggcgaagttgacgtcctccgaggtgctctcctggtccttaccgtcggcgaacggggtcacgccgtgcgagtacgagtggccgtggaaccagtcgaaggagcgggagcgcgagaagaacttgacctctgggttgtagttggccacgtggcgcacgagcaggttggccatggtgttgagcttgccgagcttgctccaggtcgggtcgaggcggttgatgatggccgccgcgtgggcccagtagccgtagtggaagtggtggtcgttgtacatggtgttgccgaagtccgagttgaggtccttggtcttgaaccctgcgaccgcgagcgccgcgttgttagtcgccttgcggcaagatgaagcgctgcatgaacgcctgagtttgctgggcttcgtcaccttcaagcatctagatctgcccgtgccgaagactgaagagcaggagcaaacatggcttcgcttggcgaaccagttggaagcgatgacgcactgccccagtcctcgacgcaagataacgtcgcctacatcttggagtaccggagtcaggggttggaaaaaataatatcaatacaatagttacggcatttttagcacagaataatttattattgctttagggtgcccccgtacaatggaaaattgtcccaatacaatatcaacacttgcaccaatacaaaaactaagcttactacaaaaatcccgtatatatttatcgccaataattgtgaaaataatgtattattggctgacccttttttggttgggggttggggtgacgccctccccggaacgcgtggacggcggcgaatgccgctcacgggcttccggcaggcgctctcgggcgtctgcaagtcccttgcgagtctctccctttggcagccaccttcaccagcagtactacccgtcacaaccccccttccgtatcgttctaaccgcactgaccgcactaaccgccttagaataggctcgttcaatgtgcagtccctaggttcgctatacaagcagtttgaaacgcttccccaagacctgcgccgctaccagatcgatatccttggcctccaagagaccaagctgtatgagcttgggcgctttgaggtcggagactacttactactaacgttgccggcacaggaagagcgctaccgagttggatttgccatctctcctcgcgttactccttacctccgtcggtgctgggctcacagcgaccgtatcggcatcttgcaggtgcggctacctaacacaggacccatcaacatcgtcacggcctacgctccacacagcgggcgcccactaactgaagtagatgctttctatgcagaccttcgagcagccatggaccaattcccccacagagatatcaccatgattaccggagactttaacgcaaaactcgggcagaaaacaaccggagaaacgtttctcgggcctcatgcacgaggcacgcgtatccggaacggccacctcatggctgccttttgtgatatttatcaactctttgctaccaatacagcctttcccaagcgagcgaaaaacaagaccacctggagccagcgcaagcggtcacactgtgtctacaatcaaatcgactacgtactctgccctcagagttgtagacggttctgtctagatgcccagtcctggggtggggccatcaccccgtccgaccacaagatcgtcaccgcggactttgagctcaagcacatccgtcgcctccggtttccgtcgcgtcgcacaagcggcacaactgttcacctcgcacgcagcgagttagttcacagcgacgactccagaaccgcttacgcatcagccgttaaacggatcctaccccccgcagacgctgacgattgatccactatcaacctgcaatgggaggacacttttgcgaagctacacgaagcagcatcgcagaccatcgggttttcttcgccggatcaacgacgctgcagcagctacgacgatccgctgctcgccgcgctgtccgagcaacaacgccagctccggctccgcattttcgacgacacatcggccaacacagcgctgctgcgctctcagcgaaacaagatcctacaccagatccgcactcgctgctgtgacctcgctaacatggccctcgacgaaaaggtttcacgcatcgaggcttcaagcgactgtcacaaaatgttcgttgccgtccgcgatctcgcccgcaaaccgacacagcagcttctaattcaagactcatcaggtaagtatatacttcacagaaacacagctaacaaaattgtccgagatcacttccaagaacagtttctaaatccagatcaagctcaagtatcgccagactgcccaatcacgccggacgaagtccgtgatgcccttcttcgactgaacaacggtcgtgctgctggccccgatgctattcctggtgaactactcaagtatgccgctgctgacgttgctccacgactagcacatctactaaaccgcagcttcgaacgcggtgaacccatcccactgggccaaggtatcctgctgtgtctccagaagccgaacaagccacgagggcagtgctcaagccaacgcccgatagttctcctgaacactattcgcaaagcggtgtcactcatcgttctccgccgcatcacacccgcggtcgacaagtttctctcaggccaccaaagtggcttccgcaagagccgcagtacggctgacgcggtgtgggaccacaagtggctgtgcgcacgggtacaaaagtatcgcgaaatcgttcatgtactgggtatcgacttctcgcgcgcgttcgacacgatcgacggtgccaaactcctcaaagttctacagcagtttctacacgacgacgaaatccggctgattcgactcttactatccgacacaacgctttcactccgcatcggccaccagatcctgcaaccattcggcagcaacacaggtacgccacagggcgacgcactctcaccagtattatttgttatctacctagaagcagcacttagagatctagctagtcaccctgcaatgtcgccggacctgctccagcaaatgatcgtgtatgcggacgatgccgactttatctgtcgggaccccgccctcgtcgagctcatccagacccatgcgccggaagtattcgcgcgctggtcgcttcaaatgaacgcggcaaagacggagcacacaattctccaccgctgcctgacacctgccagtgccgacccccacgctcgtgcagaggaagaagcatggaggtctacgcggaagcttggctcgttgctcggagatgccgatgacgtatcgcgtcggaaaatactcgctgcggctgctcttcggcggctctggacggtctggctgagatcgcaccgtatcacagacacgacacgaattcacctctacaactgctacgtactgccgatactactctacaactgcgggacctgggcgcttacaccaacggagcttcaccgactcgaaagctttcaccgtcgccagctacggtctgtcctcaatgtgcgttacccgtaccacatcttcaacgctgatctctacgcaacgtgtggcgagcggccgctccgtcaccggatcacatctgcgaggtgggggcttctcgggcacattctacggcgaccacaagatatcccggcgtttatccagatgaaggcgtatttctcttcctcagacagcagcaagtggagaggtaggccccgtaccacactgcctcttgtccttgatcaggaccttgatgctagtgggtgtgggtaccgcctccgcaccagctcagacttggagagacttcgactgcttgcccaagaccgacgtaaatggaaggccctcatgactaccattgctgactcactgccagccaaaggagactcgacgtatgcggacaccacagtatgccgccgactagctaaactgagactagcgcaggtgtaatttggctacgcgaacacgtaaataattgcattgcattggctgaccctgtattgcaatgattattactgcgactccaaaaccaaaatacaatatgatattttattttccgacctgaccggagtgcgagcaagttggtgtcagagcctggctacttcttcacgcacttggtgtcaagcgtggcgtttctcgaggaggtggacggatcgctactcacgatctcagctgaagaattcgacgaagggctgcgtcggagcaaggagagtctccgacaacgtggcgtgcgtcgtgaactggaccacgaagtggcgagtaacgccagcagtggcagtacgagtggagaagctttgaatggcaccgccaaggttcttcaaactgagaggcgaaagcaaatggctgcacatcatgctgctagcaaggaggacaatgaggaagaatcgctgcgtctaccgaatgtgctcaaaatccgggccaagcgcctagcgatgctcgcgtagatatctactgcgcttcaggtaacgcatgcaatttttgatcagtgcgtgcttatctacatcatgatcgctgctacgcagtcggctgttcatcttctttctcctgtctgaaagagagtgcggcctgtattgcctcgcgaaagtccccaaccaagtcctcagcttcgcgtcctttcctcaagatacttattcgcgctcggcatcactccgctttcattagccaagttgacagcacttcttcagcgtgcggatggtaggccttgtcgtagcgctacgaacaatggtgcagcttgcacggtcgaagcgacagaggaaccgcgcgtcgagcttggcagccagcgacgaagcgccagaggcagcggagataaacagcgagatctgcgtgttagacgatagctttgcagagcgacagcaagaggaaggtagcgctgatcggccaacagcgctgggcaggaaacgcgttaggctacgctttgacggacgagtgcttgctgcccgtcgtcaccagttcatgcagttgagaggccaagccgcgaacagcgcagcgacaacggttcgaggctgctacacgcttgccctgcaagagctgacggcctggaggaaccgctccaaggtggcgtctaccgcgaccgaagacacaccgtcgactgacacctcaagcccgcggaagagccacgatctctcaagcgtccgcgccccacctcgcactctttctccaggtctagcatcgcaagctcgctgtcctccgtcaccgacttggaggacgatcgacgcaaggagttccagcgctcggagttttctctcgatgaacgtcgagtcaagaacaagtcaagccagtgtggattcgccgagacgaactgcggcagccacgagcaactgctgcttgtcaatgcgctgccgctcaacgacagcgacgacgaagacactgcttcgacaactcgccatctcccttaccgaagtaccaagatcgacggccgcgagtacatcctcaagaaccagtgggtctgagtcagcgagtccaagtcaagtcgagtcaagtcaagtagtacccccgcaacaagcgagagctccgaagctagaccagtgcatctccacgtccgctgatcttcattaataacccccccagcgcgagagcctgtattagacacgattcgacaaaatgcttatcctgtattagacacgttaaggaattttcacttcgtctttgtataggctaatacaaagttgaagtcaaccgggggtaggtatatgccccatcctttcccgatcagcctgcatagtcgtgcgcggcacttgaacttcgtatttcgtaaaaataagataccagaggtgctcagcgtgctcgtcaaatcagtataagtatgtgaaggtgtttgcgcacgccatccattctggcctcacttcagaaaatcccgcgccgccgcacagacctcgcgctaccgcacgtttaccgcccgacacccaaccaacgacacgatggttttccgtgcgcgctggaaggagttcacgaaggccggatggacctcaaagaagcctgcgggactctccgtcaacacacctacatcaagcacggtaaaaccaagaacgatgtcgagaatgaagactttttcgtcggcgcagaagcgctaatgaagtatctggaccattgtgatcgtggtacgtttcgagaatgaccgtattttgttataactcaagtttgacgacatcttttctcttgtggctaatagtggcaatggaggagaagagaggaatggagcgccgagcctacgaggacgcgattgctgctcagaacggacaagccgaaggcgatggccccgacgaaacgtttgcggcgcatcaagcaagtggccagcacgactgcccgagagatgatgttgacgaagcccaacaaggtgaccaatttgggtaacgtgtattggatacgacctagatctgactctatcgtgtacgatacaggcaaagctgctggcgaaccgctcatcccaacctctccccacgttgaagacgctgaacctggtacatgaagcgatgagcaggacgctggatcggatgctgcggacgcccagcctcctcagtcgcaaggtaacgaatgataacttgtgttctacaagctattgggctaacccaaacgtgtattgtacactcaactcaggtgagggtaccccaagtttcagccgccaccgcgttgccgatctggtctctacgtctcctcatctcgggtccgaggccagcagccacgtgtcaagccctgcatgatcggcttcaccaggtaagtcaatgaagtatcactgaaaggcgttaatttggtgttgactctctgcgtttgtcgtatctgttttgcagcaaccgcttctcctcaaacgccaacgcgaaatcttcgctcggagtttggccagtgcgatgcacctgatagcgagcgagtacgagccgtcggggagtgatgaagaggaacttgaagaagaatcgaaagaggaaagcgaaatgaacgaggatgatgaggaaaccaaagaagacacaccagtttctgttggtaagtttattgtgtacatacacatacatacacgataccgatacattttactgacttctatcgtgtatcatacagatgatccaaacatcatgcagcctggggaagtcgttgacgactacacagtattggattcagatggggagaatggaacaacctctgtgttcggcgatgacgaagaattggcgctcacggaaccggctgcggaggtggcagcttcggcctcggatcttcatttcaatccctcactgctcgaaaccgtgggagggttgtcagagattgcccacggcagcgtgcccaaggacgttctggcggacatgaagttcaatggatggacggaactgaccaatgtgataccctacccgtacatgcaccagccgtacaacgcgcgaccagacggctggatcaaagaagcctaccaaacatctatgaaggagaacatggacctacagccgatgcaattgctgcggcattgacaccgtcgggagctttctttcgctttgtaccgccgcacttgtgggaagctattgctggagcaagtgatgactacttcaaggacaacctggacctgcgagcagctgcccagtacgccaagcagcagaaacgaaaggagaaacatcctgattttcaagttcagacgccgcaacaaataaaggagtttctgcaaactacaaaggatatctcgggcagagaattgtgtgtctttattggtttgctgatcaccagcaccatcgcgccgtagtgaccatcgcgccgtagcgaaggactatcaaacgtacatgggcggcgtggacgtacatgaccagcttcgactccagaggtaaagtgcttgtatcgtgtatgtacagttttatcaatactgattatcgtgtatcatactgctttattacagatactctcttcaaagggccagacgctacaagaaatactactagtcattgttcctgggtctgattgatctcgctatcatcaatgcttccattgtgtacaactggcgccgcaccatggatggcaaacgcaaagctacgcacgtcgagttcctgaagaagcttcatttggagttgatccagctgaagcctgacgactggacccaaatgctgcgccaccgcggcatgcaccctacaccatcgaagcaacgcaaggctacaacaactcatgtacccgtaccaaccgacgagtggaggaaggacaacacggacgacacgagaaagcgacgccagcgtgcctgcaaggtgtactcggtgctcaagcgcgctggcgaggcgagaggaggcgagactacgttctactgcggtggcggcaagctcaagacggcggcaaaaaacgctcatactgcacgagtgttcctgtgcaacaaagtcaagcacacaagtaatggtgaggcagttccctgcctcgagatttggcaccgacactggaagaacggtaccgtgatcccgccgtccattaccaagcgcaagattcgcgctcggaagccggcggcaacagcggcggccgcaagtgacggcggcagtagtgacagcgatgccgcgtctgatgggagtgcgcgcgcgattcagcagcacaagcgtgctcgacgaaacgcaatgtagtgtgtgcagcagctcacaagcgtgctcgacgaaacgcaatgtagtgtgtgcagcagctcttctggctttttatttgacttaatttgagtatgcactggtgttgctgattgccatctgacttgattctctaaatatcgaaaaaatttgaccttacgactgcgctgtttttgtactgtgatacacannnnnnnnnnnnnnnnnnnnnnnnnnnnnnnnnnnnnnnnnnnnnnnnnnnnnnnnnnnnnnnnnnnnnnnnnnnnnnnnnnnnnnnnnnnnnnnnnnnncagcagaaacgaaaggagaaacatcctgattttcaagttcagacgccgcaacaaataaaggagtttctgcaaactacaaaggatatctcgggcagagaattgtgtgtctttattggtttgctgatcaccagcaccatcgcgccgtagtgaccatcgcgccgtagcgaaggactatcaaacgtacatgggcggcgtggacgtacatgaccagcttcgactccagaggtaaagtgcttgtatcgtgtatgtacagttttatcaatactgattatcgtgtatcatactgctttattacagatactctcttcaaagggccagacgctacaagaaatactactagtcattgttcctgggtctgattgatctcgctatcatcaatgcttccattgtgtacaactggcgccgcaccatggatggcaaacgcaaagctacgcacgtcgagttcctgaagaagcttcatttggagttgatccagctgaagcctgacgactggacccaaatgctgcgccaccgcggcatgcaccctacaccatcgaagcaacgcaaggctacaacaactcatgtacccgtaccaaccgacgagtggaggaagggcaacacggacgacacgagaaagcgacgccagcgtgcctgcaaggtgtactcggtgctcaagcgcgctggcgaggcgagaggaggcgagactacgttctactgcggtggcggcaagctcaagacggcggcaaaaaacgctcatactgcacgagtgttcctgtgcaacaaagtcaagcacacaagtaatggtgaggcagttccctgcctcgagatttggcaccgacactggaagaacggtaccgtgatcccgccgtccattaccaagcgcaagattcgcgctcggaagccggcggcaacagcggcggccgcaagtgacggcggcagtagtgacagcgatgccgcgtctgatgggagtgcgcgcgcgattcagcagcacaagcgtgctcgacgaaacgcaatgtagtgtgtgcagcagctcacaagcgtgctcgacgaaacgcaatgtagtgtgtgcagcagctcttctggctttttatttgacttaatttgagtatgcactggtgttgctgattgccatctgacttgattctctaaatatcgaaaaaatttgaccttacgactgcgctgtttttgtactgtgatacacattagtcccccctaagatgtattacccagacacgataatgcgcataagacacgttagagctgaggtggcaagttggggttaggtgcatggaccggctttgggagatacacgtttataatagtgtggactccactatatgtacccagcatgagataaatcaatatcgtgtataggatttcggccaacggtgggaactcagatcgctcgcgctggaggggttaatggtttcgacacgtggttccaattacggatggtcaggcatcccgaaaaataataatgcccgaaaatataacagtattttcggatacaatactatatttagggcatcaccgtttgttttatccgaaatttatgtagccgagttctaaaattcggtattttacttctgctcatcctgctccaaccattagttgtggtcaaacatcgcaactttgccgttagaccccactttcaaacaagcaccacccagcacgcgcatcacgactcgacgttagcaccatgaccgacaatctcctcgctggccccgctccgaggcctaccttctcgcccaggcatattgctgccttctacttcaagccctgcctggacgaggagggagagacgacgggctactatgcctgcaagacctgcgctaagcgccgcaagcacgcgcctaagtcaggctacagcaacttggtgtcgcacgtgcgggcggcgcaccccaactacgagagcgacatgcgcgacgctagtgtcgctgcgacggggaccctactgccgtgggtcacccagaaggcctcgaaccgctacgcgtggctgcgctgggtcgtcacgggcaatctaccgctgtctttttgcgagtccaaggaaacgcgacagtacgtattttcatatctattttggtgatttacatgtgtgctaatgccgtatgttatgtagatacatgaagctaaatcccatctccgtggagacgctgaccgccatcatggagaccgtgaccaaggccgtagagacgatgatcggcgacgccatgcccgagcgttttggtctggtccttgatgggtggacccacggcacggagcactacatggcagtgtatggctgctttgagacggcgacaggcccccagtacccgctgctgtcgttagcgcccgtcatggatgagcctgacgaccagctgagcgctgacggccatctgacggcgattaaaaggttcctacccttttttggtaagtctatctccggatgtctattcctggttggtgacaactgcggagtaaacaagcgactggcgaacctactcggtgtgccgctaatcggctgtgccagccaccgcctgaacttggcggtgcgagactacttggagccccacgacagcatcctcgaagaggtccagcagcttatgcgtaagttgcggactttaaagcaagcagccaagttgcggtaagtactctgtttgctgtttaatttggtttttgtattggtactaaattggtctttgtttttgggttttgttcgaaattagtcattggccgctgtcctcagacaggacacgcgctggccgtcgaccttttcaatgctcaagcgctattttcggctccgtccgttcatttcggcggacgacgaggagctcgcggacttccttccgtcacgctcagcccaccgcaagctggagactttgctggcaagcctccgggacgtcgagtccgtgtccaagcacctgcagggcgacggccttacgctgctggacgctcgtgtcctattcgacgagctcctcaagagccacccctcgttcgcgaagtatctcggtaaggatcatcgctcactctgcgtctgatggtatttctacttaactactgcgttttatatgtttttatttatgcatagccaccgacgcggatatagtccactccgccgtcttcgagcaggcggtcgtcaaggtgcttgacgaccaggcggccctgctgacggacgacgaagtcactgcgctggagccgttcaagcgcacgctggctcatgtggaaggcgtggactgcacgccggcggacaaggaagggttcgctgtgcgtgcgctcaagcgacgcaaggtagctgctgcgccggccacgtacgagctgcttaatgcgattcctcctacctcaaacatggttgagaggctcttcagcattgcgcgcgctatgctgcgccatgagcgccaccgcctctcccccatgatcttgttcctcaagatcaacagctcgtactgggatgttgcgaccgtggagcagtgcctgtaagtaggtacagtcgtaacaggattgcagtaatttactgtgtcaacactatgcctcgcgttatttattcagtctgctactcggatgctatgcaatatttattatggtgtccggcaaacaatagatatatatcgtattttcagcatgcctgcggatggtcggccattctcgttcggtctcttgtggtgtggtaataccacttaaattctcttctaccaaaaggtattagagacaccaacaacacgctaacccgcaaaggtaagcgcttattggatcaaaacctgaagaccaggaacgatcccttacaccgggtcggttgcaagcgcctctgtgcaccttaggttatcttcggtcaacccaaaaacctgtaccactagccacgagctaaggctaggatactatgtagcgctttcgcgcaaccccactgcagtccctcagaaaggaagggtaccggcgtgttaggccttatacagggggaccaaggtaaaacctcggtaggtagactaatacactcagggacactctaatcccacaaatatatactgaacgatactctaataccgttcctgcctctccggccacgccaactcttggcgctgccaaggaaactctcggtcaatgcacgataagctccccgacaggcatccacacgcagccgagcgtgtccaggcactacactaagctagctacacttaccgaagtcggacttgacctttgttggctttgggggaagactgtctttttattactgagttttctgaggccctgggggcttcgttctggtcatcctatgatgagtcctatgtccctatacaaatttctagtgtgaacgatcgcaataagcgattccggatacatcaaatgacgaccgcggctacactaataagtgcggccgaagtacgtaactaaatgcatctgtacctaaaagtgggtaccgtgaagcctcgttcggggttctattaggacccgacgaggcttcggccaccgactgtcactccaccgaggataatgtcgtcatccaatcaggagcagccatctccgtctctcgcttgacctcgccttgattgccccccttgattgaacttgattgtcgggctggcgggtcaacagcgttggaaactgccactttccaataccacactcttatagtgcgacgttcgtcatgttcagcaagtggctgctgtcgagctctccccgcaagaaagcaaggccttctctgcgtgccagcaggcgccaaggcggctcacactcaccgtcgagtgcagtccaagaactccaagaagctgcggatggtcgaggatgtccaggctaagatcgcgaggacccgagagcgacgggcccgccaccagagaggccacggcgaaagaccggcgcaagcggagggtgcgcgcgcaaacttcgccgcgcgcacccaagctgcagccgaggccgcccgagcagcgcaccggcgaggtttgcgacctctcgcccctagacctctggatgatcagcaggaggcgtccgctccagtggcgtcggtggtggcggagctgacggcgtttgccaacagcctgacagatttgccggacaacgccgaagtggccatgtccaccggggtggcgaggcattggggcactgatcgcggctataatgtcgaacgctccgtacccgtgaagccctcgggattgaagtcacttgcactgtaatttaatgcatacttttattaataagtttttaatcttaaaacacacttaacacagattatttactggaaggtcacttcaaattatgctggtttcatcaaaattaaatccgcaagtggcccaagccaccccatactttgatggtgccctcggaagcatctaaaacatgctctggtacgttttcacgctgtagttgctgctagttcaggcgtcattagcactcctatcttcctacccatgagaccaccccttagctgttcattttcgatactcaagctcagttgtttgaagggtcaagcatgcgctatttttagaatcgactcgatagcagcattatcagtgaagtggttgcacatcatagcatgctctgcttttaataatgctcttcctcctaagtgcaattgcgtatcatttagagcacacgcagcgctttccaacgatgtttttatccccatctggaagaacctaacggatttaaagacttttgacctagcatagcaaaaggcggcttttcgtgaccttccagtaaataatctgtgataatgcatacttttaagtttttaatcttaaaacacacttatacgaggacgcatcgcaccgtgtcccttgtagtgctggttgcgaacaagttctgaacgataccaacatttggaacttgttcgtaacctttccgaaagtgttccatttacaagaggcaccaaagcgacactatagagaactagagagcttgtcaattccgcacttggcgagaagcttcaatttcgtacttaatcgcgaatatgaaccacccgaacaacactgaacaattggatcaaagcgaacaattggaacaataggaacacgcctgttcgcaaccagcactagtccctaggcgcgcaaaggatccgcggatccagtgcagcatacaccatggtggcaagcgtccaggacgccaagacatcgtcttctactacctcagtgagcaacaacgcaatggagaagaacgtgccaagcgaagcggaaatgggtgcgctcttcgaagcagccatgaatcagcagcagcaacagacccaaaagactgcagcggagcccaaagtgacgcccgaggagcagcagaagttcctgtccgccatgaaggacccagagttccgatcgctgctgaacgactacatggaggagatctcggacccgcgcaaccgcgccgagacggagcagtacctggcgcagctcgagaacgagcagaaggtgccggcggacaagcagctcgtcaagcccaagcccggattcgtggtcaagaccaagtgggacgccgcgcaaaagttgttcgtcaatgtctgcagcagcgacaagatgcagccgccctccagcaccagggtcacctctggccagcagggcacgtcgtggaacctgccctactcgctggggctggagaggctcgagcccgacaaagggggctccggcgtcccgacctttgacgtgtgcttccacccgcgagtcattgagtttgcaatggctcgagcggattacaggcacatggtgatcagtacgtgtctggatgcggtcgagccgatattgagggactcgaggcgcaaacagaaggcggtgctggccaggaactaccacatcctcaagggcgtgttctacaagtccggcgaccccgtcacaatgtgcttgcggaaggagcgtgacgtactggggccaaccaaggcaaaaacgacaaagaaggtggagactaagactaccaagaccaggtctaaggacaagatcacggcgctgggggataaggagaatgccccaccagctcaaacgatcactcaggtaggtggtaaagctgatgattcagtgctaaatcaattgacgcacgtgaaggacaaggagaagaacaccgcgctgatgaaggaggtatcgagcgtgaagctggaaccaaagcagaagcttgacagccataagcaaaagaagaagatggagcaccagctcatttaccgcgggaacttcgagctcctccaccacatgcaagcggatccagggaacaaggtccctgaggatcgctaccgcccgaaagaactcgtcgttgaggtgagcttcccgctgtcgactagtgcgaagggattagatctggacgtgagcgagcggatgctgcggctgtcggccggcccaagtgttccaggcaattatgaacctctggagctggctctaccattcccagtgatcgaggagaagggcagtgccaagttcgaccgcaagaatcacaagcttgtggtcactttaccggtgcagcccccacccaagccgaaaccgcagtctgtctcgctgattgttcaggatgaagacgaagaagaagaagatgaagaggtgggagataatgtggttgaagctgaaccaaacaagtcgacaagtccgaaggccagcgcacctaagcagcagaagatgaaggaggaggagggggaagacgagtttcgaatgcttcgagagacggcgctgatggtggccaacgacccgcaggtgcttgcacacgctcagcgtcaggctcaagctcaggctcaagctcaagctcaggctcaggctcaagctcaagctcaagctcaagctcaggctcaggctcaggctcaggctcaatactcggtgccagtctcgcgattatctcctcccgtagtgactgagccagcagctatcaaggacgacatttacgatgacttgccaccgcttgaaagctgtagcgatgaagaagacgatgtcggcacgagtgaaaatgttgcagatacggaaaagacaccagagacgttgccaacagcaactgatccagcagcggagaccagcaaagtcgaagatattatcaagccaccgttcgagacgcacgacacagaagcgtgcttatcgtacattgtcaacgtgtcagacattgacttggccagtgtgaaactcacattcccgtcaccgtcttcgttgaatctccggttctcggacaagaaacaacgcgagtacgagatgcaggttgcagtgcttccagttgacattgaaccatctacggcagagttcaacgtggccagcgagaacatggtgatcatcctggagaagaagacaaccccggcttcgcagacgaagacggcagagcagcccaatatcgaatctccagcgcctcctctcgctgctgcccgattccagaaccagcttctctacgagctggactagcaaactgtttaacgaacactatgatgattcataccctcccaatcaatgctgttacctcatcctcggtagctcgcaccacagtgcacttcacgcatgttgcatggcaatttcacatgattctctttattttacagttctttatccgctagcgtcagcgcgatgtcttcttccttgatggctatttcttcccgcaaggcaagacgcttagctcgaagctcgtccattttgtcacggacatctcggatctttgcgttgttcagctcgatgttgtcttcaagtcgcgcgagcacctcaggaaggatcgtgatgaccatttccttggttcgcagccacttgacgcgctctccttcactcaagagactctcaacagcagtatcggactcggctgaaacaccgcgctcaaggttccgcagcatttcttcgcagtcttcgagtcgccgcacaatctcgtcgtgttgctggttgcacttctgcctcgtgtagtccagcagctccaacgatgaccccagttcggcctcctgcagcacaatggcctccatctgatgcatcaagttgtcacgtgacactcgcgacgacgccagacgctcgccacgctgacagtcgcgactcattctctgtcgaaagcccaacgtcgacgatggactgtcagtatccactgactgcagcggctgctgtaactccacccacttctcgtcttgaggaaccaccagacaccccttcatcttcttcatcttctgtagtccaaggtcaacgagtccttgttgcagctacactggtatttatacactcagcgtgtagccatgatgcacggcaaacgcagccatctcaaaagttgaagttaattacgttctaccacaccattttcaatgttggctaccagctcacgctacaccaacctcacactgactacccggtcgtcaaggctcacttccacccgtcctggcaacgatgtcctggccaacagactctaacctccagccaaaccgcgcgcatcatgacggaggcgaaggacccgcagccgctgccccaggccaaggagctggagctgctgacgccgccgcccgctgcgcccgtcggaggcggccgcgtgggcctggccgccgcctcgctcatctactcggcggacgggcgctacgtgttccagcgccaagcgcacgtggtgcgcgtgctgcacgcgcagagcggccgcgtgctgcacgagtgcgtgcgcgcgcgcagcaagagccccgtgacggccttggcgctgcacccgcacaacgcgctgcagctcttggctgcgtatgagaatggctacattgtggtctgggacttcgtggagcagaagccgctgctcgagatggacgccaaggcgcccgtgctctggatgggctcgagccgcacgagcccgtccaagctgctgctcgtgctgcagggcgagagccgaagctggagcatcgtggagttcagcctcaagaagaagaagcgcggcagcgtcgtcttccagcacagcaagttcaagttccaggccgcggccatgcagagctacaagacgccccagggagagggcgacaaggccgtggccggagactacctcgtggtggtcgcgggcaatatgatgttcgccgtgtggctgcaccagccgcaggcgcccacgggccgagtttggaccatgcagaagctcacgcacctccgcgacgtgacgtgcgtggccgtgagccccacgcagcgcgagttctctattggtgacagcattggacagatctaccgctaccaccagctgcagacggccgacgacgccgcgccgtccgccgccatgatgcactggcactcgcacgccgtgcactgcatacagtactcgagcaacggccagttcctgctctccggtggcgaggagtgtgtgctcgtgtcctggcacttggagtcgggccgccgcgcctacctgccgcgtctgcctgccgctgtggaggtgattgctccgcgtcgcgatggaggtgtctacgctgtgggtctctcggacgacgtcctcttccaatacaacccagtgacgcgtgaacaggagtgggaagcgcgtggactggaccgtgccggtggatctgctgccgcctcgctgccgactcgtcaattggtggtggaccctgtcactaaggctctggtgctaaatggctcttccggcgctggtgtattgcagttctacgagccctttgccgaccgcgtgctgcagacgctgctgctgtcggagcgtaaccaggtcacgcgcacggaggacgagcagctgcccgctctgaaggcctcgcactcgtgcttcagcgcccgcggtaatgtcctcgctacgctgcacgcgccgactgaggcgaagagcggtgaagagcaggccctgcgattctggactcgccgcgtggacggctctttctacgtgaatacggcggtggacgcgcctcacgggcgcgcgctcgtgacgaacgttgcgttctctccttcgcaccacggagactgcgtagtgaccgcggacgagctgggagatttcaaggtgtggaagatgacggcgactgagggcgggtcgtggcactgccagtcggttgtgcgcttccgtgacgagccggtcacagctgtgggtttcgcgcgcgatggatccttgctcgcggtggcgtacggcaacaagctcacgctttgggacgtctcgactcactccctgcgccgtgttatcacttcggccgatggccagaagatccgacagattgtcttcccgggcgagaactcgcctttcgtggttatcgtgactgtggaccaggtgcaggtttggaatttgctgtcgctgtcgctgtggtggcgctactctgtgcccaaggaggccgtggtcgccgaggacgccctgtacgaacgtttcctcgtgtggatgcctgtgacgaagaactcgaaggagaagacgctgctgttggtgttcgatccgcagacgcctgtgcccacctgcgtgcgtgttgtgaagctcggcagcaaggcctggagcgccggcttccaccccagcaccggagacatcatgctgctcgacttgaagtctggtgtgtggagactcgatggacccaactcacgatcggtggaggcccgtcgtcgcaagcaggctcacgttgcagctctggccgagcgcaacgccgccaaggacggcgagcaggaggccaaagcactgagcgccatctacaccgccgcccgtggcagccgcgctcctcagaagaagaacaaagacgttgggcccagcgcggttgctgccaacggatcggcgtctagcagtctgttcgacgctccggcccacgtactgccgtccatgacggcgctctacaggtccttcatggacacgatgctgcccaagccgcaccaaaacgtacagagcgacgagcccgcgaaggagtcggcccagaagaggaagaacaagaagcgcaagatgcgccagcagctccagcaccagcaacagcagaacgcagcggacgccaacgagaatggcgagcagcgcaagcgcaggaagctccaggtagagaaggagctggccaacccggagctgcagaagcagacatattccaaactgctcgagacgttccgtaaggcgcgccggacctaagctcttttgcaggagatgaaatagatttacgtgtttagcgacctgctgtgcatttgttgtcaacggtcacgctgagagtttcatgttgaaaggatcaccttcgtgatggacctccacggccatcccgagcagaatgtttctgacgaagccataacttggcgttgattggaaaggaatgtgaccgcgaaggtaaaaggatcaaacttttcttacgaagacatgcaaaattttaggcgctgttggtcgcagcgccgacggtcgacgccttcggagtgtaagtgttcatgacgccttcgttgtcaccgcgccaaggacgaacgtttgctgcctttgcaccgatttgactcagggaggaggcaattcggtcgaagaccagtcgaatttcgcgcactgcatccaaacatttcgttgtgatgaagctcaaggtcgaggatgagacagaccacgccacgccgtttgtaaagcacacaaactgaacttgactcgtccctacggcccgagtaattgagccattgatcttctactgtagaaaaactcaattcgcaatttgccttcaagtactcaagtgcttcgtaaactcaagacaaaccagtacttccaccttcgccatggtcgacagcacagtgctcctcttcgtccggatactcgccgccttcggtgcattggccttggcctgcagcccctcgattctcatgaggcagattcacaagcagaagcacgtgggcgtcgcgtccgtgattcctctcgtcatgctgctcatcaactcgcacgtgtggatgatgtatggctatctctcagccaactacttcccggtgttcggctgcttcatcttcggcgacctcgctgcactctcctacgttgcagtctactggcggtacaccactgagcgccgctacgtggctcgggtacttgcagttgtagcgacaatatacatcgttctttcgacttacgctatcgtcggtggtctcggctgtacgggccaaacgcgagcagaggtggccaagaatatgggctacatcggtgatgcgacctccgtctgcctgtacgcggcgcctatggagaagctgttgcaagtgctcaagcacaagtcggccatcttcatcaacgcgcacatggtggcggccagtctgaccaacaacgtcgtgtggtttacctacggcatcctcacgtccaactggatcatcatcgggcccaacatcctcttcatcgcgctcaactcgttcacactcgtgctctgcatagtgtacaaccccaagacccacccacttcacgaaagcttcttcgccggcaacgacgacgacgctcccattgaagtgtccgtcgagctctcaccgaaggctgttgctggcaacaaggcagcaaacatgccgagccccgagtacaaggcgatgcaatctccactagagcctctgcgtctacaactagacaggaactaaaaaccgaagttaacaaggctacttattgaacacaaccaaggtttgtaacttgttgtgtgtcgtagaatttgtctatacgctgcatcaattgaacaagtggtgcttgtcacgcttgcgcttgcgcattttcttcttggcgacgtcgatgttgcgatcctgccacttgctcttgctgagcttcacggggcggttgccaatgtacttgccgttcatctcgcgcagcgccttggcgcagtcgaacgggtcggcgaagctcacgaagccgtagccgcgcgacttgtgcgtgagcttgtcccgcaccacgcgcgcgcgctggaacgacgcgtacttagagaagctgtgcgccagcagctcgtcgctcacctcgttgcccaggtctccacagaacaggcggaagtcgttgtccggccagtcctcgagcgtggggtcctcccaaacctgtccacccgcaagacgcaggtgcctcttctgcttcttcccggctccgtcgcgtccttgaggacccgccgcgatactggccgccgtcctcttggggtcgtactcgtacacactctgctgcctgttcatcatctcctgctcctccatgggcagcacgcagcctgtctccatgtccactcgaggctgcatcggtctgtacgtcgcgcccggcctggacgcagcagtggcagctgcatgttcccccgttgtgcccgctgggaagccgctgagagcgcctcggtgcgccgccacgtcctccagcgtgttgagcatcttcggccgcccgtcattggctgcaattgcgccgtcagcgggcgattcaattggctgcggcttcctcacgggcgctggacgcggcggcgccatgtagatcttgggcttggccgccaccacgacgggcttgggcggggccgccagtccggcgctggagggcttggctttcttcgctgggggctgagaatcgtcctgcacgttgctgtccgtcttggctacatcttccgagggctgggtctgcgcctccagcgactggatctccgcctcgaagcgcgcgaactcgtcgtccaggtccgccatgatgcgctcccagtgtcttcgctctattaggaaatgtgacttgtgagtggttgaaatgatagagcgcggtgattcgctgaaaatgatcttatcggatggctctctgccattggctgtaattgcctccccagacttgggtggaagcgacgccaggctttagtaggcgaaatagactgaagaagaagatggacgacatggagtacgacgacgcgggccacgccggtatggaggacgaggaggtcccggaggaggagctggaggaggaggtcccggccgacgacgtgtacgagggcggcgacgacaacggcaacgaggagaaggtgcaggtgctggacgagtcgcacaagcagcccaacgcgcaccgcatcaccacgcgctacatgaccaagtacgagcgcgcccgagtgctgggcacgcgcgcgctgcagatctccatgaacgcaccggtcatggtggacatcgagggcgagacggacccgctcaagatcgccatgaaggagctgcgcgagcgcaagatccccatcatcatccgccggtacctgccggacaactcgttcgaggactggagcatcgacgagctcatcatcgagtagacagggaatagagcggagggagaagagcgtacgtacatacatacacaacacacacaacatcttttataccgaaccgaaccgctgtgttgtttggagtttgttttggatttggagggaagatggattgacgggggtgaaagggagtaatcgacgaggagttagtgctgcagtgacagctctgctacagatgcgcttgatagtcgaagtttcccggctgtctgctgctggccttagttgacggtcgtctggtacgagcaggaggtgccgtagtagcccgggaagcactcgcactcgcccgactcgtagttgcacttgccacggccgccgcagtcgcgtccctgagttttgccgtacgcaagcagcacgtcgtcgccgctggggcattccttgagagaacaatctggcccgcggtagccttggtcgcagtagcagcccatgtgcttgatgccgtcccaagcagcgtatgcgccaataacgttggcgctgggtaaggtcctagaagggttgttggcaatgattgccgcaagagtgaggcagattccgtggtcgttacaattgttggggcactccgttcgctcgcacgccttgccttcgtaacctgggaagcacgtgcagtgtcccgtgccgtagtcgcacatgccacggttggagcactcgaccaagctatgcgccgtgttcgttgccgtgggcacttggacccacgcgtcaccgtaggggcacgttcgcatcgaacagtcggcgcccttaaacgctgggtacttgagagttcctgccacgttattctcctgatcctgccgctcgtagcacgtgcacttgtcattcttgccgcacgttccctgcgcattgcatccgttggggcagtaggcatccacgcccccgagcagcagcgccatcgcgctcacgcagaagagcgccaccttggacgcgcccaacatggtcgaaggagcgtaacctgtcttgctggagctgttgcagcggtcggagagctgtgggcctggtgcggtgtacggaagtgaaccgacggagcgctgctcggcgttcgacgctacgcgaaagatcccatgtggctctccatcaacggtcgccgcgagtcgccgctttgcgtcccttcgtgcgaattgatatcttggaagttgcagcggcgaaaatctgcgacgtggtgcaaatgtagctatttcgggagagtcctattttccaccaatcctactgcgtccttccaaccaatgagacatcgcccaagcagcaatgcctgtcacccaagaacgaggcgaagaagcacgggtatagtgctgctcgtgcccatgacgacggctagaaccatggcaagcaaaccggaggtggtggaggtcttcgagtgcgagggcagcttctcgttcctgcgagaagagcaccgcttcaccttcagagtccacagcgacagcagcctccacgtcgacgtcaagcctctatgcgcggccagtcaagtagacgcgattgcaatcggccaggagcgtgtcgttcgcggaaccattgaagacatcgacgatgtagaggaggaagaagaggatcagagaactactgaggctattgaggaagaaaatgcagtccaagagggtgaggaaccggaagcggaggatggagaagaggaacaagaagaaattccggccaagctgcttgcatatgatggacgagcgctggtggagatgccacctgaaggagatattgacgatactcaacccgtgtgctacgtgatgcacttcaagatcgtgcaatggggacgtggagcgcagggaatgtggtcgcagatcgtcaagtgcatcgcgcacctctcgagcgagtatggaatgtctgggaggttttcggaggtcggagaggatctgattcacgcacaggacttcgcgttgatgccagtatcccacagactagagtcgttgcacagcccgctgcacccgttgacgcctggacggtatgaactgcgaggcatcaccatcgccgagaacgcgttcgtctacgaatgcgccgtgaacatcacattgcaagagaacggcatgatgtccggcacgtctcgagagctgccattcacacaggagtgcccgcttgctggcatgtggacgcgaagcggattgaactacctactgcagtacgagatgcacggcaacaagcacacgtacatctactttggcactccgttccgctccgggttgcagggtacatggcagaactcggagctgcgagcactggaaaacaatctggacgcgcgtgcaagtcaagcggagcgcgggatcttggagttccagctactcaaggccgttcgcgtttggagcgaggcatatcacaaagactacccggcggcattccgggagtgcgtcaagctcttgctgctcgcgtctcatcgcgatgagctcctgcccaaccacttgtggagctccattgtatcctactgcgggtacgactggttctgcagcgacctgcagaagtcgctagcacctaacgaagccaaagagagcgatatcgaggcacttcaagtgccatgaaagcaataaactgtagccatgccgataagactccaagggtggtctcatgacatgaagccctagacatgtaacattgttagatgagtcatgtagcagttgtcaatttcgtccaatcgctgaatttatttcagtgtttcagcgaatcagacgcgtccattcagtcttagtcgccattgcgccgtcccatccactgaaggggcaataatggacacgtcgtggtgcagtgtgcaagccgctagcgcattccccatgaagattgagaactcctcctctcacgaccaagtagccaatacgtctacacttccattgacccctctagatcgcgtgtacgatggctgtgtgggcggcgttttagccgagaagagccgcttccacttgcgcattgcgtccaacggttcattacacggcgaagtgcggcggaaggcgcagcgaggtgccaactccgacactgtgaccaataggaagaagaggaagctgcgggtgatcgccgaccatccggacggcattgtcattgcccatgttataggcaacgcccaggttgttgcggtggaggaggcggtggtgtcgtcctcggcgtcgactgtcaattgtgacgggagcacagcagccgcagagtattgttgtgcattcgaagtgaccaagcgactgaaccacgttgatcgacacactttgacgtgccatttgcacgtccccgtagctcctgacgccccagcagtaggcaattggcggttcttcagtgctcaagaccaagacagacaccaggcggatctctcgtcatcggcgtcgactgcatccactagtgattcgagttcggtaacaggagaagagacggcggagcagaaggtgttccagttgcaaccggtgcaatggtatcaacgccagcaagaagcggagcaggcggagagagaggccgcgatgttgcagtcgaggccaccgtcgctattgtacccgttgcggcctggcaagtacgagtttaaaggcttcacgacgtacgacacgccgtcagtagctgctgctgttgtgccgagacagaggaatggacgaagaggacgtcctgtgatgactatggtgcgagatgaatgtctcgtgacgttgcgcttgctgccggatggtacactgcgcggcacttctcgcgaggtggtgcagccgcaggtttgcccgttgaaaggacgctggcaggccaaccgcgtggcgtatgttttggagtatcgtgtgcgtgaagaggtggggcacttccgctactcaggagctgtggttatcgaagaaggcagtgacaatgccgcgaatggaaggagaaccaaggtccagcgcaaagacaaagctgttggtaaaaggcgagagacgctcagcggcaaatggaacaatgtggatgagggtcacgcggagggatacgaaggcggtcgaggcgagtttgagctggagctcgtgcgagtagatttcacgcccatcgcaattaaaaaggagaagattgagcctgctttagtcgacagtggcagtccttcagatcctgctcaaggactgcaagagcagcaaatgactgaccaatatactggcagaagtgctgaaaacgctatcgagattgacgacgacgacgatgccatccacgccttcactactggtgagtacgagctgtctggctgtgccactgacgctgaaggctacgagtatgcgttcgacctgaagctgcagctgcgacctggtgggaagctcttcggtcagagcaaggagcgcatattccagcaaacgagtccgatcttcggcatatggaactctcgagagatcaagtaccgtcagcagtacgtcgtgaagcacgaggtgggggtgtacacgtacacggctatcatgagccgtgatggcgctgtggtgcagggaacctgggttaacgacgagaaggattctgcgtcagcaccaagtgagcacggcacctttgcgctgattctggtgcagtctagaaggcagtggagcaccttgagccacgcctactatccgccacgattccgccgcagtgtgcttgctattctcatggcgtctgctagaacacacaaactccctattgagcactggacccacatcttcgcgttctgcagcgagtcgtggttcacgccgccggtgattgagtaatatatacacgaagctgcagtacttacttgcatctgggctttggctaactcaaccgcgagcggatagcgtcagttgatgctcacttcaacttgaccctttcattttctaccagtcgctgcttgacttcttcgtatttttgacaaatcagaaggaagaattcccgtacacgcggcacaatgctatgctagcagaatgcaacgtcgtgagtagcgccgtcggaatgacagtgcatatctgcatgggcatgctgccaacaacaactaatctaagaccattgctgaccatacgcaaccgcactgcctcgctcgcttctccatgcaattatgttatctcttttctcacgcaaaagaaaacttttaaggggcgagagactcgctctgctgcttgcttacttggacgagaaagccgtcaaaaagctgttcctgtgctcttcgtagcttctgcaccactgcaactctgcaacgctagcagctcgacgcgcgcgttccattccatactgcaatcctgcgcgtgtcatttcgcttatccctctgactccgacacagcacagcctcgacccagcaacaagcaagcaagccacgaagccttgtctcgacacttagcccatgaagttgaagaccacgaggaagaggatgatgttgcagaagaggtagtccgcgaaggcgcgctgctcggtgcggtcgccgaagttgttctcggggttgatctgcatccgcagcgacactggcaggcggcaacaagacagcaattccgttagtcaaccataggtagagcaccgcttcgacggcaggtagagtatttgaaggtggggggacgcaccagcaagcacgaagacgccgacggtgcacacgaagccggccaggaacgagttgaaggggaagttgcccaccagcaggcaatagataaattggagcacgcccgtggccagcacgtaggctaggaagccgtcgatgagcttgatcttcttgggcgtggtcttgtcgtacttggcgcagaagtcgcccaggatggagcccacgcccgcgtccgccgtcgtcgctccggtctttttggccatggctgtgtacgtgtctgtatctgtactgtgtctacgctcgatagaggaccacgcctggtcgtgggaacaagctatagcgttagcgacaggcagcggcagtggcgatggggatggcaatggacctacccggtggactttcagttcgaagatagcgacggacaactgacgcgcgtcgccaaagatttgtgtggtgtacaccatcgcggcgctgatggcatactcagatcaagatgaaattgtgtccaatgtgagggcacaaatccaaaattgtataataagcactcaaatcactttttttgcaaaaaaaatgtatcagctttttggtgaaataaaaaaaacaagaagaaacatttactacaaaatctcacttacatgaatttttataaaaggatattaaaataccatttttatcgaactgtaagttagcttcgaatatcgtgtttttactcaggttaagcaatttcaatacactcgaaatgcctcctactgtcatcaagaatgtggctggcttgggtcatgctggcaagatgacaggttgtgtcattttcgctaaaaagaccgaaaataccgacttttgtgtgtcttatcagatactatccagccaatgaaataaatcgaaaatatttacaataatgttgcattgtttcaatataaaaaagtctaccaagccatatgaataatgaaacggccaattccttacaattttaaaactttagtttttattattatatgcgatactaatatcatcacatgattgttggttaatattcagggtatattagacggtaaacgcattaattttacgcatattattaaggttcagtgtagtatttacctatcttaacaatctacgaaatacagttttcggtattgaaataacaatgctttaatgctactgatgacaagcccaagaatttacattcgcacataaatgaggcctgcatcgggtaacagtgtagaaataaatgcaaactctagagggattaaaccctggtcaaactcgtacgaccggccctgttctcgcttgttaaaggtcaaatcggatctgtcgcttcgtggacaatggcatggaccggaaatacccacacagtaagtatatacgcattcatgcttacgttttcacgaattgtaagtatatttaggttgaacctgacatcgctcagctgcgcggttaaatgcggcatacatgacccggtcatttttatttcagatgacaaaatgcatgaagcggaacaatgttgaagagctggatactggaaatcaagcaattcacctatcaggccttggagcggattagactgagcaaggacgatcgtggtgcgctgagcaaaataatgcacatcagcgcacacataatggtaacatgaccaagcagacagcgaatcatggagcaatcgctaaccaatttgtcaccgatccattccgtgagctggccgaacgagaccatatatacgccataaccgaagaatcaatgactcaacttgtctcgaattcccttcaccaagtaggtggatgaattgctgttaacttggcgcagattctctccgccacatctcgggcagtcttgaatttgtgtcgagctccaaccttcccactgaacgccttgctgtggccacgtgtgagcgtgaccgtcagcctggcgcgaattctctctgcgacgtctcttggggtcatgagtttgcgtcttggctcaggttgtgcaggcatagccgagcggtagcaacgtagggtagctcgagtgtgcatgctcttagcttctgctttctcatgcggagcttgggcgccaacctggcgcgtttcccatcgccgtaggcgtcgttcttaagctttagcacgtgcgacattgctccactccgcgtaatgatcaattacgaatgaatggtgtgtcggctctgcgtaatgaaaaattacgaatgaacggtgggcgtaatgaccaattacgaacgccatcgaatttgaacggtcggctctggcgtttcactttcacaatctccattcgcaaacttttgtacagggccagatacattttttccagacttttactattgccttggtttacccaagttaaacaaatactttaaaaccttaatttgatttctttacccgtaacttagctgcttcgatggtttaccgaccttattaaaaaattacactttaatgtagctacaaaagatcttgattataggataacttttataacgctttacgcttatgacatcttaaagaaatttaaaaaatttaaattgtcttttaaatatagttgttttactcaattaagctatctcaatgcacctaaaatgtcttctattatgtcatgaagaatgtgccacatggcctgagtcccaattttgcaaaaaaagaaaaaagagaccggaatatataagacgctaggtagcgcttatattgaagaaacttttagtgattttacatcgtttgagtagtattactagagaaataatttgataaatgtacaaccaatacatggtaattttaactatttttatacggttaacattgcgacgtgcttggttaatctacacaacaataatgttgtggaaaaatctacaattgatttttatctttacttacgaaaggttccgtgtagtttgccatcgatttcacagatccataaaaggtctagaaacactacggtaaagacttgctatgaattgtactctaagtatacactttttgaaatttttgatctgttttgatattaagtttagataacccaatgttttgggggctatttggttcaacgtacgcggaattaaatcatgcagtcgaatatatccaaggccaagtatcgatattagttattatcgaaatgcagtctgaaagttttagctaatatcgctcaatattcagagaattacaacaaaaaatctcactgggtctaaaatcttgacacgaaaaaccaagttatctttatctgcaccagcgacgattggcctaggaatgaacgtgtcgtagccataaagacaaacttacgttggtgttattttttttaccgaaaacggagtacaaatagtgaagttatttttgtttcctgaaatatgaaatggcgaaagtacggtgaattaatgtacgagagggcctctaagttcttgtgtagcgcaatgtgtttcctacaaagcgaggtttaacctcctgttatgctgacattctcgcgataatccaatttactgacgtctgattggctaatatagaattacgtggaacctcaatgtcgatagtaagctggaccagagaagtacgaactaaacatgtggtgtttattgctcctgtctatccataagcaaacagatcggtgttatacctgtcgatagcagacagaaatagcctcgtgacttcgacaaaaacttgagcttgggtcgacgagaggggttaactgtgcgatgttattccgcgagcgtcggaaatattttgtttgtaccaaacttcggttttggcttaaattggatggacaaacaaggtccaaatgtccgtcattcaggttttcaacgaggtagtgcatgaattgctctgcaccggcgagctggtgaacctgaagctgatcaagagcaagaccagccaccaagtcgctgtccaagggctaaccacctcgcaggtacgttccagtgaagagaccctggatatgctcactcgagcaatcggtcgccacaacactgcgatgacgacgaagaatcagacatcgtcgcgctcacacttcattttcgtggtgcgagttgtgaggtcgctacgaggtctcgggtaagcgacttgggaaaacaaaccaagaacatcatcgtcaaaaacgtcgagatgctattctaactctgcaacgcatagcggtgatgccttcaataaaatcggagccttgcgcctttgccatgccttcctgaaaaaagaaccgaaagcccaagcacaaaatgcagaattggatcgactgccaagaggtctatggactgcatatcccccgccccggcttttatctatagatttgtaggtttaattatatcaaggttgatcagcagtaaatttttatgttttcgatttacctccaaagcaaaatagattctataaaaaagttatgaatcacgcaaatccctccatccacacagacacacacaacaaaaagtctgtatatattctaaatacaataaaacgctactccccgtagaggaaaatggaaatctttttcaaaccggtagagtggttatcaaaggtacacgactaagctctggcgacggcagcagcccctttgccagcgccgttgagaacgggtatggcggatacaatcgtggagcgcgtccaccggcagctacgggagcgagaccaagtcagacagccacatgacgaagatgaaggcactgataagggtgagcggtgtaacataatttcgaaaagaaaaggaacaggttttgaacggatattgaagtgcgagggaagaatgaacgacagcatatttttctgtgaataaggtaaaaacaaattaagaactttaaatgcctatatttgcaaaacgtattaccgtgaaaatcaacttgtatccgacgtaaccgggtgtcgatcagtttagtattgtggttaactcatcgatactattttaccgttccgtataaaagcgcagctggctcgaaaatgctgtcatcttttaaaaataagatgtctcgaaaatgccccgttttgtccttatcgacgccgcaaatgccgacttttgtcatggctattttgtggcatgcatatcttagttttatcttttaaaaaaacagtctggcttaatgtttacttgaagtttgtacagtgatttgagtattcgagtcatataacatttttacactaaatatagtaaattttctttattatgtcataccaataccgtcaaaattcgttgtaaaatgtcatcaagaatgtccgaaaaggccgacttctgtcatgcctaaacccggtaaaatgccaggttttgtcatttttgcaaaaaaaggccgacgtttgtcgtgtgctttttctgtcaaatacggtataattgtttttgtgacaataaaaccaaaattgtttttaaatcacttgttctgctaaacttaaacttctggtacagttgtcgctcactgtgaatatagaaacgaaacgatccaagtgcaaaacggcattgcttttttatagtatctgtaagtgtaaaacaactgtcggccttcgcctcatggatttcgcagcagcgacattaatcttttctccccatcggtaggacgagtaagatgcagagcgtacgggcaggatcatctttagaaataaaagttggtgaagatatgcatcggtgaccgttctgcagtcgaccgcgtgaaagaagagatagcaaggggtatgaactgtttctcctcgttgaatttgacttcataaagatgtcatagatgtagatagaaacatggtatcgaacaaaatcaagaattcgccaaatttagatttatcgcctttaacgtcctgaaagctagtatgtagcatatgaacgtctcacatagactctacatagagtagctgggccctccggtagcctagaaccctggtcaatgcgcttcaatgccaccgaaatagtgattttctcattatttgtgagtcgcctttgatcgccaataactaatcaacaaagcgagcttgagtgctcgaacgaaacaacaacaaaccctttcattagttcgtatgcgcgtataaagagaagagcagtgtggagttcataattgcagtttgttctgtgagtacccgctatttggtaatcggtgacgataattagggcttgtggtgcccgattgacggtgaaataccaaaactccgacgcaccaacagtactttttcaaaaataaaatggctaactgttctaactacaatggatactaccgtgacaaactactaaaagaaccttggaggtctcctgggtgccttcacctcagtagatcgcctcacaaatgtgctcattgtagtatcctcgcttaccttcaccttcactttgacttttctttggtatccacatgtcgctctgtacaatagttcatataaacaactaatctatgcgcgcgtacgggtaagattgtacccatgccacccgtacgctttcgacctggggagaaaagattcaataaataaagaaaagtacaatccgactcaacccagaacagatataataaccataataaggaatcctagcttcgataatttcaaaaacaccgcaagatcaagcattcctgtatattcccatcatttagccgaaatttcagtgaaattaactgacttttgaggaattctttctggtcgatcggcctgtttttgtgcggctgcttgggcggtctcccaatcagattggactttgatgttgggtaaagctcccgtcgggtgcgtccgacgtgcggcgccgcgtcctagtttaggcggctttgtagcttcttacgccaggattttcatgactttccgtcacgtttcggcttgaaatgacggaaagtcatgaaaatcctaaactaggcctctagggggccaccttgaaagtggcccggcctcggccggcgtggccgtcattccgcaagatccgccccacgctaatctagccgctccccctccttcttcaccatgctcgctcgacaggtacgctgctccatccccatagacgcccgtacacgccggcgtctccgctatcttttgagccgtcgcgccgcaagatacgcgctctgcagcgcacacaccggcccatttcccctcgttatggatctaatctaacggatcattcattgcgctcgcatgtagatcatccgccgcgtcgccacgcagaccccgcgcagcgcggccatgtccacgctggtggtggccgagcacaaccaggcccagatctcgggcgccacgctggccaccgtgacggccgcctcgcagatcggcggagacatcacgctgctggtgctgggcagccaggccggccccgccgccgaggccgccaccaaggtggccggcgtcaagaacgtgctgcacgccgccgaccccaagtacgaccacctggtggccgaggaggtggccgagctgctggtggccgcgcagaaggctgagaactactcgcacgtgctggccccgagctccaacgcgtccaagaactacctgccgcgcgccggcgccaagctggacgtggcccccatctcggacatcctggccgtggccgacaaggacacgttcttccgccccacgtacgctggcaacgccatcgcgcaggtcaagtccaaggacgccgtcaagctcatcacggtgcgccccacgggcttcgagaaggccgcggccgagggcggcagcgcctccgtgagcccggccccggaggcccccaccgtgggcaagaccagcttcgtctcggaggaggtgagcaagtcggagcgccccgacctggcctcggcccgcgtcgtcatctccggcggccgcggcctcaagagcggcgagaatttcgagatgctctacaagctggccgacaagctgggcggcgctgtgggcgcctcgcgcgcggccgtggacgcgggcttcgtgcccaacgagctgcaggtcggacagaccggcaaggtcgtggcccccgagctgtacgtggccgccggtatctccggcgccatccagcacttggccggcatgaaggacagcaagaccatcgtggccatcaacaaggacgaggaggctcccatcttccaggtggccgactacggcctcgtgggcgacctcttcgacgccgtgcccgagctcaccgagaagatctaaactggtttgcgctagatctaatgcgcctggcttgctgcactcctaaagttgaagcaggatgcgaggtttagagccgagtgacgcaagcagaaatccgacaggccgcacagcccatattcatcgcaatagtgagtgctattcgtccgttatcccctgcctggcttccctcttgttttggtcttgctgtgtcttgtgtttctgcccaggggacgatcgctgaagttattaaggccgagtctgtgccggttgtgcggtgacaattggcacgggagtggccccaccgtgatacgctccaggctcttcttgctcgtcgcgaccagctcgatccgtgcttcggcgctgcgcatcgcgacgttcttcacggtcttcgttgctcttgccgatcagcacggtcaagaagaacagcaaagcggacagaaatgtcatcgctatcgcgaggtacaattctccgcagtgcacgaatcgcccgtagccccgacgacagtgcagactgatgttcgacagcagcagaatgaggttcgacacgatgaggcagatcagcagcaccaagtccgcaatcttctcgcagtagatcaccgggttaacgcagaggcgaagccactcgacgaagatcaggaaggcgaacgcgtacacgaacgccaagaagttgataatccttgcgaagttcatggcgccgcttgtcacgaccacggcgacagagcgacccccaccagtgccttggtacgacacgccggcggtctgaagcgcaatgtaagccaccaacgaggtggcaaactggaggaaccggagcagcacccgcgtccagaacaggcagatgcgacttcccatcgatcttccctccgccatcttccgatgaacaactttgctgttcttcttggggctttgatgctttcttgaaaatgaattgggactcgagctgcaaccgcgtccaatttcctgagaatgttcctgatctgcgacccgggccaggtccagttgagtgtggaaaatgttttctttttcatgttctcaagtcatgaaagccaatggagaagcatattccaaaactcttcataagcaaaactcttcaattccgctgaaatgcgtcaaaattgaactaacgttaactgcctacgtgtccttaggcctcgaatactcgtctccatgttatcacggcagcaacttacacacgggtggatgcatctttcggtgtccccgcccccgttggggtggcttccccgtggtagtccccacccgcgccctcgttgtggtgccctcccgcgtcaccgtcggaatcgctgttggctcgcccctgacggcgcgggcccatggagctctcgcagcagtcgaacaggaaggtgacgaagtacgagaacgacgcgaggaacgtgaacaccaccgcggtcttcaactcgttgcagcgcagcatgtagctgtacacggagcagttggccacgtagtccgacacaaccagcacgattccagccacaaccagcatggctgcgaggatgagatcgatgagcggctcgacgaagcgtggcgtcggtcgcgggtagaaccgcatcacctcgaccaccaggaggaagaacagccccaccagcattcccgtgtaggtgacgagcgtcgtgtacgtcgccgctcgactgcccagcatgctcgagtacccgtagtacgaggcccccacgaaggcgcgcgacaccgtggccagcgccaccagtgacaaggcgaagtcgaagaaccggagcagcgaccgcgaacagcgcatcatatctccacgcgccatgtttcaactggaattcttcgtcttcttcttggcttgctcggcgttttggggaatgaccagagtgagcggagaacaaattgagggagttccttgcatccgggacggggtcacgctcgcgacatggcgcctatgtcgttagcatggtcgaactggatgaggagttttaacggtttggttgtgccttatactacggcaatgggtgggagtggcgttaacatcgttggcgttggcgagcacacgctgtcgaagggggacacgaggctggtcagcaccatcggcgactgcggtaagctcgcgttcgtgtcgccgattgattgtcttgactcttctcgtatcggtgacaatggcggcagcttggaggcgggtgtcggccttgtgaggtggtacggtgtcgatgaactggtgacgcctatggatgtgagggtggcgatctcgctgacagccatttgggcggttggttcattgggcggcttggggaatatcaccgggtagtacttcaacgctaggatgagcagcagcattaccacggcgcatgtgatgatgacctcgagctgtagcatgtttgctctcaagggttagaatggaagtgatctgggtcagagcatcagaacttcggtgtagtgtagcagcggcgctgaggagctccgatggggaggatgcgcgactatcccatgatggagcttgcagcttgctgtgggttgcgaggagctggacggatgtggcgctacgtggcgcctgaagacagaaagtattcgggatagagcagtttgcgcgcctgcctgcagccttatagaggtctatgcggacacctgcaacgctggaatgcctcggctcaactcaagggcatgtctgtacagtacatcagacactggccttgttggtgtcctccaaatgctttcgtgcttgtgttctgaatttcaagacgcatcgaagtccacacatgatcccatccgaggcacggcggcgtgggtgctggttcagttcgccgttcgcattggaattgccaccgcctttccagcagctacgctgagttgagtcaacatcgagagcgacggcgagttgaagtgaataacaattcattgatgctctgctcaacaatctttcccaccttctactcaaaccaagcgtccgaagggccttatcgctatcaccgggggatgaactggtgggatcacgacaggagagtgcggcagtcgctcctcgcctcgtattgttcgcttgggcggactgcagcccgttcgaatgggggacacgaggctggtcatgactctgggggatcgtggtggccgctcaatcacgtgaagtgccgggtgcgttgcagctttgggggtgtcaaggctgaacggtgaatgaactttggagctcggcgtgggccacgacatgtggtacggctcgggagacatgatgccgccgcccacctcgagatcgatgcgttctctctccttctcctgctcctggcggctgcagagcgagcggaaggcctcgtagagtccccgcgcgaacttgaacatgagcgcgagcaccaagacgctcgcaatgacggggatgacgactgcgaggaccatcgcgacggccatgccactgacgctcgttcagttgactccgagcgctcgaaagtcggaatgagtgaatgaatcgactggcggcggttgcggagaaggctccaagtctcatttggtgaacccagcgcgctgcccacatccgcatctagtggcgccgctccatacaacgaggatgatgttacgctggacgttcgccgtttcgatgcttgcctgtggttagtgacgctcaattcgaagccaactccagctcttttgaggctacgaaggcgtttgacattgaattgaggagcgctaatacattatgcagttgactgtccctggactgtctacaccttggcgccgggcgagttgaccccttcgatcggagacagtgcgccggtgggcgtcatttcgaggtgatactggccgggcacttctgtcgggccggacggttccttgctcgtcgtgaggatcgacagcgtcaacgtcgcgatgaagccgaacacggcgaggaacgtgaaggcgaccgaggccttgaggttgtggcagtgccacaccagctcgcagtactcgaggtagtcggacgcagcgaggcagatgccgccgatgagcagcacgaaggcgagcacagcgtcgatcccctgctcgacgcgcgtcgacagtcgagtggagaagttgaagatctccacggccccgacgaaccacagagtgtacagcataccggtgtagttcatgagcagcacgaagttggacgagtggaaggtgatgccccccgcggcgacgaaggccaagcccagcagacaacacaggagctgcgcgcatcggagtgccaggttggctctggccacgttcgctccggtcagcagagcgatcatgatactgagtagatactagaagtccttgatacacttgggctcttgagtcgaaaagcgcgaatgaacggaacgtgactggggatcagcagacaactgcggtaatatcgccgcaacgccaagtgggtgcccaaccatgcgactttgcggcgcaacaactgcaaccagcttcagaagaactagcaagtcgtctggccaccgcccagggattcctggaagacatttcgagtgcatgttctggttgcagctggtgcgtgaaaatgtatggaaggcgggtagagcgctcgccatctgaactcttcgttacgtgagtgtgagcaggagagtgaagctcgtttcaaagtgtccgctgctcgagcaacggaatagggaggagaattgatattgacatgtggggtgcttcaactcggtcttatatcgctagactttgaagcttggttcgtcacgattgcctataggcgacggtggtggggcgacgggtgtggattctacgtagtagacctctggagcttctgtcgctgcgtgggcggcgtcttgaaccgtagtgaggcacgtcaacgccagcgacgcgaggaagaaggccatccctacgaacgtgaaggccaaagcggccttgagggtgccgcagtgcacgttgaagtggccgtagatcgtgctcttggagacgtcgctcgagtcgcccagcaggacgccagcggcgagcatcaagagcgcgagcgcggcgtccaccgcctgctccatccgcgccgtcaatcggttcgcgatgtgcagcgtctcgacgactagggtgcaccacagcgcgtacagcatggccgtgtagctccaggtgtagacgaagatggatacactgctatagaggccgtagtagacccccacgagagcgtcacgaggatcatcgcagtcaggcagctcacgaactgcagcgcgcgcagcgagacccgcagcgtccgcagcgtggagggcaacaccagcattgtacccgggcttgaacgtggggcgtggaggggggtggggcgccgctattttctacggggcagctgcgaaaacgctttgcggtccgggtgcaagttgaagttgcctcgacgctgattggctaattttacggcttgtgtacactttgtgtaaagtcgtgcggccgcacttcaacgtgcactgtactacagtacagtgactgtagccagcgggcaagacaatgggttaaccacagagagagagaactcggtgtggaggaaggaaggcccacctccatggagctgtgcctgtagtagaacacactaaggcactagagaacaaagcagagcaaagtaatactaacttggaattgcattcactagaaacttgggtacggcagtgaaggctgcgtctccgaatacacacggctggaggggcgtcaccctcgccctcccccttgcaggcagatgatgaagaagaataacgtcatgctgctggcggcttacaccttggcggcgggtccgtcgccgtgggtgccgatgggcgagagcgcgcccgacgtgggcgtgacgttctggtggtagggcacgggctcctcgacctgcacctctccggccaggccctgcgacgagcccgtggcggccacgaacgtgaggccgagcgacacgaggaacaggaacatagcgatgaagtcgaaggccgtggccgccttgaggttgtggcagtgccagccgtagccgcagttgctcgtgtagtccgaggcggccaggcagatgccggccaccagcagcgccagcgccagcgcggcgtccgtggcctgctccaggcgcagcgccgggcggttggcgacgtggaacacctcgacggccaccacgtaccacagcgtgtagagcatgcccgtgtagcccatgagcagcacgaacgtgctcgagtgggtcgcgttgccgccgtagaagcccgcggccgcgaacgacatggccagcaggctgcacacgaactgcaggccgcgcaggcccaggcgcaggtacgccatgttggtcggggacgtggcgccgatcggcattgtgaacagtagagctgtgacttggattggcttggagagtgttggtcttgctgcggactgcccagattcgagaatggctcgctcccgtcgagttggcactgccaagagagtgttggacaatacgcgacacgccgttgtgtacccaagaaaaatgcgctaaaaagtcgccaaaaagcgacttatggcggcgcctctcccctgactttggacggcaacttgtgtgtgagccccgatggcgtggcgggcggctgttgctgtctgtcatctactgcggcgctgtgcggccgcccgccgtcgagatgaagctaggttggcggcgttgcgggctggattccagcggcgttaagcaatgccggactgtcctggagtcaagcctgtgctgctggatgcaagctgcggtcgtgcagtgggccgttgtcggaaggcggggagcagagaggagaaggcgggcgcacccaaagttgcctaactcgagcagtggaggatcgcgacacgaaagccacgcgctttgcagctggaaaatccaccgcgttgtgcggccgagccagctggtgcttacaacaagagacttatctggccatggagagcaccggcaagacgttgctgccgaacgtcgcggtctgtacgcctcatttctagaaggtcttcactttgagagatcaaaagcagcaagttctctgaccttgtgtctcaaaatgatctgcgagcaataaattgccatggcaattgcctctcaaggtactcgcgccgcatctgctacatggaagcagactgcttggcgtcgcagaagcccacacatcgttggacactcatgagcgcgggcatcgatgcccggcttgctcaatagctacacttgtaaacataccgaccctcatcatgctgagcatttcggtaatctacactacacgtaccagcaagacaaggaattctattgatccaccactacgcaggacgttcatttagacttgagatgtgaacacagttgacggcacattcgatcacggaggggattaaacgtgtgcttttagtgctcgcgttcctatgagcaaatcgataaaactgcagcgcacggcgcgagcagcgagctgcccttccgctgcaattcagtatcagtgctcggcacacagcaaaacatgcagacaacagagactgaagcaaggatgtaaggagctgatctaggcccgcgggggtggaggccccctcgttccactctcatcaacgcctagacagtgaaaaggccaagctcagaacgagcccggccaccaccaagcattcctattccacgcctgtaacagagctagcgctacgggggagagcaagtaaactcctgacatagaacgtggcggcgacgacggcgccggcaacaatttacacaatacactgagcgcttccaaagctttttccgaactgagggctctgtcgggttcagaccgctgcacgaatgactggcgtgcagccaataaaacgaagtagtgttacgaagtaacgttaatgaaagtaacctgtaagtaactcctgaagcctctctaaaccaatgccggtcgactttgaaaggtgctcaaataacccgaatagaagcccgtcaatccgtcgccgcacaatcgaccgccgtcatgctgctgcagctcctgcgccgcgccggcgccgctcctgccgcctccagactcttggcacgcgatgcacagccgctagctctttcgtctcgccgccgcagtgtgctcgcgcgcttcagcagcggccagccgagcgccgacaagccgctggggctcaaggacggcgcccagaccgtgtcggggctgtcgcccaccatgcagatgctggcggtgtacgtggtcgtggccatgtcggccatgggcgtcgtggcgcgcttcaagagccgggatgccaaggaggatgaggtactgtactctacagtcgattgccctagatggaagatttccatggaatcgttccctctgttgacgttgcagttgccttgaccacctcccggaaactgaagttgcgctaacgtcacggttgcgtcattgttgccttgcttgaataagaacgtgcgcatcttcaacatggccaagcgcgccgtggtcaaggaccggcgcgtgttcgagaccgtcgggtacccgaaggacttcgagcgcatcaaggagctggacgccgacggctctccgattgagcccacgagcagcgaaggtagcttccgggtcaagggcgacagcggcagcgtcgtggtgcactaccgccagaacctgcacgcgggcgaggacgacgaggaacgcgacagcagcatcgtgacgttcgacgagctgagcgtcgagctggaagacggctcgcgcttctcggcgctcgagtcgttcctggccaaccaggacgtggtgacgcaccagaagtccgagacgctgggcaacaagatgttcttccccgtgatcggcggcgtgctcatcggcggcgtggcgtccttcttcgccatccgcatcctgcgcaaccgaccgttctacgtgcacaagctcgtgctggaccacgtcaacaaccacgacctggcgcggcagctgctgggccaccccatcaagagcgaccgctccaagtacgtgggcgtgctcaacaacgaggccgccaactacacgatcgcgtgcagcgggcccaagggcaacggcacgctcatcgtcaaggccttcaagaaggagaaccccgacgagaaggccgcggaggacaaggccacgagcgtcatggccacccccggcacgtcctggaagttctccacgctcgtgctctccgtcgcgcgcaacgagaagcgcaagaacaagaacgcaaagaccatcaacctcctcaacggcggcgacgtgccgcccgcgtcggcgcagcggcattagatttagagcaaccgaccgagctgctagatggcgtctcacataccctagtaccgaatagaactgaagaaggccaattaatcaaccaacaacctgctatggttggacgacagtggcaccgcgtcggctctccatcaatctgtatggcggaagtccggttcattcacatcgtggtacacttcggttcgaatggaattcggccacactttggaagaccggatgtaccagtgcttggttagacactagcttcactctcgaattatcccggtggcgcctccatcgcccagctccttcagtcaacccccaatgcatgtgaccatgcctccgtacgcagtcacgctcgcctgcatcgtactgcgcggcttccaactggtgttcgccttggtgtcgatcatcacagcggcgatgacgttccggatgtcccgcgcctcgaacggccaacccttccgtctcggcagcgccgagaacgtcttcgtcttgatcgtggcgtacaccatcctgcagtattcgggggcgttgctggtgctcgtcgagctgttccccatgatgcttcgtcctcgcccgaaagtcacccgaacgacggacactctcttggtcattctggcgctcgtctcgggcatcgtgctcgcaaccagcgactacgaacaggactgcgaccggtacgcggttctggtgcgctgcaggaacatcaggtcctcgtacatcttcgtgctgctgagcgccgcgcctctaattggctccgtgctcctgactttcgtgaaatccgaggacctccgactggccgagacggacgagtgtcgtgaccgagcgggcagctaccgaatggtggccattacccccgtgagctgttcactgtcgccgatcgacaaccgggacattgtcacggcgtagaacgggggtgtagagcattctacgtgtagttagtgggggaagaaccaactatcaaaccgaatcgtgaatttcatacgtcgatttggttcgttattgctactgcgctgcacgacgtcgcatcgcagtgggggagcgcagtgccgagcccgcgcagttgcggcggaaatcgaggtgtccgctgctcggacggcgcttgcgactgctctcgtagtacttgtcctgacggcgacgtgcgttgtgcactcggtcgtagcgcttgtcggcgatgtagatgaccacgaagcacgcgacgaacgtgaggccgatggacgcgaagaagaggccgaggccgcacacgggtccgatgcacgcgtcgcccgtgcccttcctgcctttggtggggccgcttgagatggtgggggcagcagcgaatacttgggataactcgtcttgcactgtgcgttgtcgctggactgggacttcagtcttcacagcggggagaatcactgggctggatggggtcacgatgccacctcgacggagtgagttggcgttggtcttggctgggaactgcaggaccagcagaagcatcgccatgactagaggaatggacaccgacggcttgactcgcatacttgagcgactgattgggagacgagcttgagcagacgagaggggattgtataatgtgagttgtgaaggaggcaacatcgattgggatatcgctgcatcatcgcatgattgtttctctaaatgcatcggctgagaagcaagcgaaaccaacgttcccttttatcttcgaggatgcagggtcctacactatatatgcggtccacgtactgcatccactgcattgcatgtaggatcaagtatcttttgctgaagcgatctccgtcctgcagcaggactggaagcaggactcctgcttccagtcattttcccccattttgcaaacggcagaaggtttctcctccgctccaagataatcctagcgttcaggctgtattcgtcaacgcaacttggggcagttcatcctgtacctgcagtttcttgatggaagtgttcaaaatggacgtatgcacaccaacacctctgcttcactgacgcagaacagaaggaggttcatgctttctgagaaagaaaacgaagccaaggtcaaaccgaaatcgttctcgtagctggtacttcgtggacttggggctaaattcagctacattcacacaattgacctcaagtatttcaattcgtctgcgttaacgaacacgaagcacgccatgaaggtagcgcccacacccgtagtgatcgacacaggacgcgagctcaagacacaatccaaattcggtgacagccctaaagcaatttcttcacaagaaccggcaaacacttgcatagaccgagtgcttggttgcgctcgaaagctaattgcaggctacaacaagctccaggtcagtcaccgtggaatgtactcgctggaaagactgaaggcgttccaggcgtattgcgagaacacctcgacagctcgtgctgtcgctgtctgcctgttgaccccctttggttggcatcgtgttgctcgagtgcatccccgtggttgatccagagttgcgctggaaagccaactacagcttttggatccgcttcttcctcagggttgatcgttgccatcagcactacgtaccagataaccggtctcatcgatcgcatctccatctcgctgatgcaaagtcttcgcatcgccgtaatgctcatcgactgtgtatgccggaactctgatggtgatctccgtggtttggatctttcccgttacgtttggcgttgtcgtcggaattggcccctgcttcctcgtcttcggcgtcatcttggtattcacgataggactgaagccattcaacacaaacccggggctcgcccacgaaatgcagcttcagttctgcgtactgggagtgcagggccttatcgcgatcctttatcctgcgcttagcggcatttacaccaaggcgagctcgaatgaacgcgctggactcgtcctactgcttcctctaaccaagttgatcatgaagaacattgtggcgtgggcctcctcccactgggaagaccacgttcctctcatcgcggtgtttccgatcgaagtgttcaacgctttgtacgtcgcgacgtgcatgcaatccacaaaatctacgctagctacgatcgttatcatcacatttgacgtcgtcagcggcatcttcaccttatactcgttggttaaccgtacgcgagccatccaaaggcagatgcagcgactggaggctgatttgccgagtgaaaagcacgcaagtggcgagcttattcccaaggtgatgactgcctcgcaacaccttaactctttccgaacgcgccgaggctcagtcattcgagtgcgcgcgccactgaagctcctacttggagtcgaaaacgaacgtgtactcgactcactcactcgtcacttggcttggtttgaaaaacgcgaagccatacgagatcccaatgctcaagacgacgatcataagctggagttggcggagagttcacttcaactactctttaactgcgagtaccatgttcttgtagagtacgtcgagtgtgctgaacccataatattcggcatctactcaagtattcagtgccagcttccttcgaggaaattctaccccatgacgcacgacatggagagaggccaactggaggaatgttgacgagcctctcggtgtatgtcgctctggaaattttatccttcgtggtcatgcacgtggcgctcacgtggaagttcaagctgtcggcactctatcagctagcgtttgtattggaaactcaggttgtgcagattcaagcgcgactgttcttctggatcgtcttcatcctccaattcacactgcagcactacggagtggacttcagctttcacttcgcgtggatacactaaataacactgatacgttgagggtttttctttttccttttcaattgtgcgaacccctgttttgaacttgacgctgaatgttcgtcacaaatagatttgtatcgcagagatagtgtcatggcagctattttgatgaagttttcgagcgatggctaaatcgatcaatgcagcgagggtgctggtactaaattcagcttcttacttgataacaacacttgtagtaagttgttgtaagcggcgaagactagaaatgaatggcaagaaccaggtcaaggtggccgctggtctcggactcgacgaaccagggcccgattatccagagcagagcacccacaaaccaagcactagacctgagcagcatccccgaaagcaacctacactggcggtcaaaaagctgctcaactttggtcgaaaacttgctgctggctacaataagctgcaggttagtcaccgcggaatgtactcgatcgagcggcttcacgcgtaccaggcctattgcgagaaaacttcggtggcccgagcgattgcggtgtgcgtgctgactccgttgccttcactacttgcgattatccttatcgagtgtttccccttacgtgatccattgctcgggtgggaggccaactacatgttctggattcgattctacattagcgggattattgtcttcatcggatgtacgtatcaagccacagacatggtggatcgcgtgagcatctcgccgctccagcgtctgggtatgagtatggtagccatgagcatttacgttggcacggtgatacttgtgtcgtatctgtgggtcttccccgtaccattcgggatcgtcctcggtattgggccatgcttcgcagtcttcttggtcgcgttgataataaccatcgggcctaaaactttcaaatcaaatcccggtctgggtgacgagattaagctgcagctttacgtcttagcggtggaaggcttcatttcggtactttatccggcattcagcagcgtctacctccgagcgagctccaccggccgcgcgggccttgtgctcttactgcctgtgattaaaattctcatgaaaaacgtcgtggcgtggtcctcgtcacacgttgaagactgcatccccgtcgtcacggtcttctcgatcgaagtatttaacgctctgtacgtggcgacgtgcatgcagtccacgaagtcgacgctggccacggtcattatcatcgtctcggacgtattgaacgttattctggcgttccgatcactgcttcatcgctcgcgagcactcgaagaggagcatcaagctgctgcgtccgaaggcaacaagcacgcatcggtagagctcatctcaacagtcatgacctccttccaccacctgcggacgttcaagacgcagaaggggaaggagattcgagttcgctcccctgtgaagcttggcatcgcaaccaataccgaacacgtcctagacactttggcggagcaccaaaagcaattcgtgactaacggggctcggaaggttttgcgtgcggcttcaaagctgcgaggcagtgctgttagtcgtggaagtaccagcgccaaagcgagtggagcctctaaaattttcgtcaaagagttcgtcccagcagaagctcctccagggcctctcgagccgcaccatgtactggtgaaacaatccgataccgcacaagttgcgcagaaggagaacctggagctgatagagggcacacttcagctgctgtttcattgtgagtaccatgctcttgtcgagtacgtcgagtgtgccgtccccatcctcttcggcgtctacttaacgatcctgtaccaacttccagtacacaaatattacccgcacacgcgcgacttggaggctgggcagctcgagggaatgttgacgagcctttccatctacgtgacgctggaagttttgtcctttgtggggatgcacatggcgctgaagaggaagttcagcttgtctgcgctgtaccagctatcgtttgtactggaaactcatgtcgttcagctgcagagtcggatgttcgtctggatcgtgtttattttgcagttcacactagcacactacggcgtggacttcactttccagttcgcatggctgttttaggccgcgtaggtcgagctgggattactgggtaggatatgcaggatcgcggttagagtggtgtggtaggataacaccacagctaaactattttagatgctatgggtcactgcgatagtgatcaaggtactaaatacctgaaagactaatttgagcttccaagtaagtgaaacgtgcacctgcgccttttgtcaaatttcctgaagatttcaactcgtgtcacttctgtaatgaatgccaagaacttgctgcaggtgtcgcccgcgcccaaaattgttgggccgacacccgacctcaagacgcagagtaggcgaaccagcgtgacggagcagcgccgacatgcacgatccactctgtggaccaggcaggtcttcaccttatggcaaaagcatacagctagctacagcaaagtacaggtgagtcatcgcgggatgtactcgatcgagagactgcaagctttccaagcgtactacaagaaagcctcggtggctcgagctctggccgtttgggtgctgactctggtgccgtcattactggcgatacttttcatcgagtgtattcccttgtctgatccggcgctggggtggaaagccaactacatgttttggatccgcttcttcattagcgggattattgtgctcatgggcagcacatatcaagtcacggacatggtggatcgagtgaaaatctcgctactgcagagcttttgcatgagtgttctgggcttcgggatctacatcgcgactgtggttgcaatagcctatctgtgggtgtttcccgtgccattcgggttcgttatcggtatcgggccaagttcgctgtcttcttcgtggtcttgatactgactatagggctcaatacgttcaaggcgaaccccggtttggctcacgaactcaagttacatttccacgtattagctactgaggctatcatcgcagtaatttatccagctttcagcagtgtttttctccgagccagctccactaaccgcgccggtctcgtgctattacttcccctcatcaagctcgtcatgaaaaatatcgtggcgtgggcttcttctcatgtcgaagactgcatcccggtgattgccgtgttctctatcgaagtcttcaacgcgctgtacgtggcgacgtgtatgcaggccacgaagtcgactctcgccaccattgttatcatctcggtcgatgtcctgagcggcattttagcgtttcgttcgctgcttggccgcacgcgcgcgctccaagagcagcatgagcgatcccaactatttgactcgaggggcaacagacgaactacggatgagctcattccgactgtgatgactgcatcttggcatcttcggtcgttcaagaccaagaaaggcaggattattcgcatccgctctgtcgtgtaggaacacatactaaattatataatagcacactttccccaccaacaacacccaccaagtcccgatgactcaatgggcttgttagggttagaacctgaaggcccaggaactttcccttgcaccgggttgatgtttcctctgtgcaccgtgtttccgcttagtcaactgacggaaacccagcgtcaccagccacgagcaaaggctgacacgctctcacacacaacataaacctcgcagaccctcaggaaggaagggtcccagccagtcacggcttgatacgaaggtgccggagctatactccaacgggaaggataaatggagtgcgctctcgctcctccactacacggcgatgactcgcccttcgtatacacggccacttcttcactactcttggcctgaccacgggtaaacgaacgctacgatactagcaggcgcgtccaccgacagtcataatcctaccaacaggtttatccaattgctacgggaactcaccgatagcccggacgtcttccttgagtggttggaaggaaaagctgttctgttcttgttgcccaaagggcttatctgttctatcttctctttcctatggttcaatacaaatatctagtataaacacgtccgttttggatcttcccaagtaaccaccgacccttcagagcctcctcgacgccccaagaggcctctcgatgactctattggacgatgaagacttggagcagtcgaacggtcgtcttaagtgcggatctcgggtcaaagttcgctgtaagttcggatcgtacttgaagtcctgggtctcgaacttgggtgtcgacgagtcttcggcaccggtccagaatggccaatcagcatccgccgaacattgctgaacatgtccctacgactcgggtcgccactgaagcttggtcgtcagctcgattctcgtttaccacagctcccccatgaagctcgggctgggagccgacgctgagcgtgacttggattcgctggtgggccaccacaacgccttcgtgactcgcgggacccgaaaggcaactcggtttgtgtcaagattcattactagcgcttggggctctgcacgaatcaagcctgaaagtcatgacagtcattccaagggaccagagcagcctactgcgcaccacaaagagaccgctagttctcatgaagagctgcagctggaactggttgagagcacgctcgagctgcttttccactgcgagtatcacgctctcgttgagtacgtcgagtatgcggttcctattctttttggagtttacttgacgatcttgtgccagctaccgacacacaaatactacccgcacacacgagacatggagcccaggcaacttgaatcgatggtggagaatctgtcagtgtatgtagctctggaggtgctgtcgttcgtggtgatgcacatcgcgctcaagcggaaattcatgttgtcggctctatcaattggcgtttgtacttgagacgcatgtggtccagttgcagagcaggatgttcgtctggattgtattcattctccagttcacgctgcaatattacggcgtggattttactttccaattcgcctggatacataagagtgaagggggttagcacagcaagctttgtaacttaacaccaattttgcagtatgagaacaatctatccctgcatacaacattacatttatgtcggagctaaattcagactgactcgaatttgccttcgggggctagcagcatgcatctcaatcgtctcgtccaagtcgcaccgctgcccagtatcgctcaacccaaggacaagcgatctcacgaataacgaaacatctcgatttccgtgttttccgcgatggaccacgcaacttcgttatcttaatgtcttggtattgctgtggtctcgatgtgtttctacgtctcgagtgtgatgattcttgcgagtatttcggtattccccgttccatttgggctcgtcttcggtactggtccgggatttttcatttacatttcgctctgtgtacttgctgtcggtcccaagacattcacaatgaacccagatctggtcctcgaatataagaagcaagtgcacgtgttgatggtggaaattgcgctttccatgacctatccagctttttctggactacattttaacgccaatccaaactatcgtgtttgcctggtattacggctcccgctcacaaaaatcgcaatgaagaacgttgtggcttcggcgtgctcgcactttgaggattacatgccagtcatgacagttttctcggtcgaagtgttcaacgccctctacgttgcaacgtgcatgcaagcgacaaagtccaaagtggcggtcggtgttattatcattcttggtgtcgtcaacggggggttctcgttcttcgcactccttgaacaaactcgcacagttcagcacacgctgctatacgatttatccagcgacaagttggcacatgggggtgacctagtcacgacgatgctgccaatttgccagaaactccgagcttttcggacgaaaaagggcaagttgattcaaatatgatctccatcggactgagacttggagaagaggtggagcgcacactggactcgctagttgctcaggagcttttgttcttgaaccacgagacacggaaagcatctgaatcggctcagaggacgttgtcaggcgagttatttttcaataacaacagcaagcacaagagatcaagctccgtacgcacgagtgagactgtggcagagcggcgctactcgcggcagccgtcctatcgatccctatcacctgagcagcagcacctcgctctggtggaaaacacacttaagctgctgttccagtgcgagtatcttgctctgatggagtacgtcgagtgcgcagttccagttctgtacggcatttatctgtcggtcttgtgccagctgcagaaccgacagtactacccacaggtccagggtatgacgcccgatcagctcgaggcaatgctgacgaccatggcggtgtacgtggcgctggagatttcctcctttatagcgatgcacgtccttctcgagcgcaaattcaagctggcggcgctgttccatgtggcgtttgtactggagacacacgccagccaagtccaaagccgcctgttcgtctggatcgtattcatcctgcagctcgcgctgcagcactacggcgtggacttcacctgccgcttcacctgggtgtcttagcccaccaagatggctacatttcgaccacttcaacgaccatcactcacgttcttgaagtgcaacaagtgcaatatctaccaatcaccagtcccagaaacgtcgtgaaacgaccaatcaacgtccgtttcagcgaaaacggagacttgcccccaaaggatccactcattcttcaactttccttcaacctcccacgcgtgacttcgtagcccaccactaaaccaatgaacccggatgtattgagtttcctcctggaaaacgacccgctcctctccactataacccccaccaatataatgtcccaggccatggtgtcctccttctctatggacgtgtcggcctactcgagcgacctgtacgagtaccccgccaccaagcgaccggtcgggggcctgcccaacgccttcgtcatgtgctgggaaaacgtcctcgtgcccaccaagtggatgcaccagcagctggggctcaggtcgtccctgcaggcgctgcaagccgccaagcagcgcgccctccgcactccgaacctgcaggcggcgctggccgcagtggagcaggacctcatccaactgctcacgtccgtgtcgagctacggcccgctcttcatcgtgagtgaggagagcgtgcagttcgtcgaggccatgtgcaagaccttcttcccgagactggccttctgtctcggcagctcgactacaatgacgagtgtgcacgtgattggatcccccagcagattccagtccgcagcggagaaggcggcgtggagagtcaatctgctgcagagtctctgtcgtgacagactcttcggcggagcgccgcagaggctgctggaccctcgagcaggcaggttcggactcgtggtggtcagtccgcaccaaacggacatcgcggcatgcggcgacacgtacaaggccgctccgttcgtcgtgtccaagagcgtccacgtgcagaacgcacggaatttgacgctcggagagttcacgctgcatctgaggactctggcggagtacgtgccccaggctgctccgtgcgacaccagcttcgcgattcagctctagctcatcataagcttgagagattcaactaactagaggtaccagtatcgacgatagtaaaagggttttatggtattgctgaccgtgaaatgtccgacttattgtttatatagagacgttatcgcctagctgagctgagctgagctgagcttagctcgcttgcgagggtgtcggtcgtctctgctggctttgctgccagtcttggtgcgccaattccatctattaggacaagagggtcgttagtttgacgccgaacgtgccatcgctttccgtcgacgaaggcgggttcgcacctgcttgaagtgactcgcggcatctaccagcgctgcgtctgtggctcgtcgagctcgggtcagcgccgtcttgcgcctctcgtggaatctactggctgcgtcgctctggatggagtctccggtatctgcgagttgttcccgagtccgtgacgtcaacgcagtgagttggagcttccacttggtcatgcgctcgctccgctgcttctcgtagtctgcgaggctgaacgtggccttgttctctgcttcgaacgtctcctgcttctcgagaaggtcctgctcgtgctgaggcagctcgacttctacctgcaacgcgcggtactcatccatgggcgagtggagagaagggagcggcactactgctgcgtggctctccgatgctatgctgctactcccaatcgacgatgaggtcgatagtggaggagcttcaactgaagacatcgacgccggccgacggacgtcatcaacctgcaccagattcggcaacctctcgaagaagagatgcgcgttggccggcatatgccgcacgaacgggttgccagcaagacgcaggatacggagggacttggggaactcgctcacgtcgaagtcgtcgatgtagttcatagacagatccaggaacttaagctgcaagcaacaggatgataaatgtcagcctgaagccacacctaaacgatctcaacgcgaagaatactacgtacattaggcaggtgccggaggttcttgacttctcggatgcggttgcccgcgagcgccaggaacgagagctggtcgtggtcctccagtccttcgatcgtctcaatcaaattgtactgcaagtagagctcctccacgtgtgtgaacgcgtcgaggttgtcgatcttgccgatgtcgagccagtcgagacgcagcagcttcttgctcagcatggcctggatctccttgtcctcctcctcgggcgtccgcgcccgtcgcgttgggttcctggccatcgcgagactctcgcggatgagcttcatagtcagcggcactggtcgctcgctctctcgctgcgtggagacggcgactccctcgatcgcctcctccagcgctgccatctcggcgtcggggtccgcctgctccacctccgcttcgtcttcgcggccctcaatgctgcaggtctgcgaggggcgcgtggttttcagtccgaggctggcgagccaccgcttgtccctggaggccatgacgcgctcgatcgctcgctggtcctcgacgcgctggacgttcaaggtcgcgaatagctccatgactcagctcaaagctcgcagtcggatggaaagcctgcgacgcacacggctatgcagaatgccctcgaggcgagtctttcagccggcttctcgttctctttggacgatcccatccgttactccaggtgggacgaggctggtaacggcaggcagggcgtcgacgcacccctccctcggctggtcatgttgaagtgctccagccaatcagaggcggcggagacgaacttgagccatgcctcatgtgaaccacgtggccactctgcagctgaagcgtgaggcagagctagtggcttgcgagcgagcgcagatcgaccttatcactgtacggatgcagagctgctgagctgtgctgcatgggtcaagtccaaaccccatgctgtccaaatttagacccttttctatttttttatattgcgtccaggtgtcgtaaaggtgtgctggtctggtgatcttgtcctgcttggctggctgttccactagctagggtagctctatatctgggcaccatcgagacccgggtcagacctctctggatgctgctagtcgccggagcacacgcagctgcacatggcgctgttctccgactgctggaagagccgaggcgccacgctcgagcgattgcagcagcttctcgagtacgtccagcgtctgcatccacccagcctggcgccagactgcgttcttgtctatggcaatgactggccacccgccctgactgacgccttctctatgcatgcagtgacgcggaagaccaagctgagaccgagcgcaaggccgcgacccacatccagcggctcttccgaggacagcgagttcgagctgctgtcaccagacagacgtaagcttttgatctctcttggtctcctaccacacggatactcaccggttgggtctcttcaacttgatcttttttatgtagggatgccgagctgatgatctcccgcgtgtatcgcggccacttggggcgtcggcgctgcaagaggctgcgcgcggagctgcatcgagctcatcgacgagcagtgctcgactactacgccgtcgtcatccagaagctcgctcgcggcatccaaagtcgagagcattgtctggacttccgcaaacgcaaggcttacattagcgagctggccgccaagggggacagcatgcgtcgaatgctggaagagaacctgcgtatacagcaagaacgggagcagttagcaagcgagcaggctgcgagggaggaactggtcaaggtcacgcaagaccttcaccacctcgtgagcacgaaggctgtcgcagggatctataactcgcccatgcagcccgccagcgccacgagcttcggcgtgcccgtagagacccatataagggaaaacgctcgtcgagttgtgtccacacgactagcaaccgccagaccgccgtcaagactgacgccgtacccgccttctaacaaagtaactctgcaagccacagcaccctatgatgctgtccaacgagagacacggaagcaaaccaagtaccacaagttgagacgcatcggcacgaccgacttcgcagccgtgtacaacccagagcaggacgtcgcgcggaaactcaacgcacctggaatcaacgcaggcatcgagtacctggacgactggaggaatccctacaagaagcgaggcgtgccacgcaacaagcgagacctgctgccgcagttgtccactttaggccacgcacccgagactccgttctacttgacctacggcggcaacaagagtaaagtgctggccaatgaccgcttcgacgtgtaaagtaactattaaagaataaacacatccaaatatgacacagcaaaaccatgcatcttgcatggatactgtggctcaaaaagacacgcgattgctcgagtggcttcaaggcaagttgattttgacgtcttattcctcgctgaccttcttcagttcgttcatgttggtgcccgccagacgttcacctaaacaaaaaatagaagcaacaggttagtatacacctaaacaaatcggcaacaacaaaaaaacaaattttgttgccaacccaccgaagaatttgaggctggagatggcggtctcctcggcgccgttgttctcctccacgaagacggtgatgctcttgacgcgctggaacttgacgaagcgcagctccacgtcgttctcgggcagcaggtcctcctccttcagctcgatcgtctgcgtgggctccacgtcgccggcgtccgagaagccgaggttggggcggttcacgaagagtttgatcacgcgcggggcctcctctccctgcggggccacgatgttgagcgagaaaaccttgacggcgtcctggaactcgatgtagagcatcagttgctctgtttagagaaagatacgggaggttagagataaatacggatttttagagaaagatatggatagagctcaccatcggcgtccgacttgagctgcagcgtttcgtcacccatgaagaggttgccgaagggcttgttggggtcctcgttcaggcagtagcagtccttggtgctgatggcctccttcaggtccccgtagggccggctcttggcggcggcggcggtcgagctcattgcaatttgagacgaagggcgaaatgacgatcctccccataaaagtactcggggtttgtataaaatacgtatttatcatggaaagcttataatttgccattcagtgtgggccacactggttatataagaattccatcagaatgtacctaaatgattgtcaaaaacgtcaaaaactcaaatttacgtaaacgacttgtcaaaaacgtcaaacacgaaattcgaccgccaatccacgccatcccaacaataaccattctcgtatttacgtaagttacatatgggatttccggaattggtgtattcccaccccttggagtacgacacattgaccgaggtccactattgcgcagttaggatcggaaaaacgtaagcggcggtagccgacgataagcagagactcctattggtcaaaataaatctatctaagcacgcatagagttcaacgcaatgagatgctttggcgacctcaggctccattgtggttaaacaactactttccgaacacaggttcacgtcaccctgcatgtcatgttcatgtgtaacaccaaaaccagcgcaattttaagctacagcgtcgggtcgaggccgcccaagcattttgggtaagcatcgaccacattttcgttctacatcaaattatctccgtctctcggtactctcgacagcctgttgttgctgttaggttgcgtcgtgccattcgttcagcggtacatcacagcgtagccgcagacgggagaacgtcaccgcccatggcgtgaccgtgaccgtctcctccgtctcggccgagtcgacgtcggcagacgtcgtcttggagcgggtggcactcatggccgaaccaatgacagcagcaacaacagtcactagctgcctgccgaatgaatgagtgaagggggtccactactcggtggagtatcctcggcaggagtagccatacataggatcgaaggatggtcgccatgggtgccatcgcgaaaggtgaccgcgctgtgcgatagtggccaagcggtaggcgctcatgagtcgcgatgaccgccgctgtttgttcaaactttgaacttatcacacttcgtgtttaactcaagtcataacgcgatccttttccggatgcgccaagctccgtcgtcgtagtatggcttcagcttttccggttgccacggcccaaacacctacatttatctggaatgcgtacgctagtaaattcgccgcttcgatatacattacacttgaggtctttccgaacgacttaagttacttgtactgtaagctagtgaatccgtcactctttcggcccagcgctaatcaggtcattttagctaatcggagcgctccattaaagcgtcggcggccggaacttacgttttctcaagtcaattcaaagcctaagccaaaacttgctacagaatcgcattcaataccatcgaagcgaagattgttgggttatggtaaaataacgatttacgcctttcgtttaagacagaattggagcaaatcacaatacagtttatgatttatcttgctcaatattttggttggttgacatttaatatgagcttatactacagcacgggccaacgaccaatgccaccgagtcgggcccccggtgactggcctgtagtgtagctttgactctggcatcttcttcggacatattttatatatggtaacactttgtgcagcttagtttgtagtgcaactgctgggccatggacaccaacatcaagatcaccatattgatttgcaaaccgcctgttagatcacgcaattagccgttgcaagagtatgcattcagttgcatcctgttgcttccttgaaagaaggtaacaaaatatcgtcatcgtttgacacaatgaggggagacgtgactgttgtaagcaatactgtaggttaacctttatcacacagctcgaaagcccacgcgtgggcgcggcaaatatcccacgcgtggggtttgctgcattagatgttatcatagaaaaatgtagtataaaaatctgcagctgagctacctatacttcctaaacagagtgagtgtgcactgcatgacagtctcggttcgtcttcagcccacaaacaccgaaaaactgcttcttgagagggcccgagcagcctgtgcagtagaaagacgctttcttcccgcaaacaccacactttcgctgagcgcgcaacgccgtcccactgaggcgctgatactgctccagcgcgctaaacgctcgtagtgtgtgtgtaggagctgcatcaccctcgttatcatgcccagtactcactcgagtcgaacgctgcatggtaaagtcgttaaaaatcaattgatacgagagctgagaggtgaaagagttgaaatcagcgatagaagaatcgcggcagcctgctgctgttgcctcgtattggtaggcgcggtaggcgtctacaacaaccatcccaaaaagagttgcaaataatcgatggtgccactttgtagtgtgccaagtcctctccatttcgagatacccttgcctgaggtggtcgtgcacatcaatagtggagaacttcgaaaaaaacagttcaatgatttgggggcgctcaatacgacgctcgtactgcaaagtcttcgcttggccgccgtcaacaatgagtttatggcgtcgtcggacgctatcagcgccaggaagtgttgtaccgcggttggaaattatgcacttgggtttgcggtctgcccaacagagtgcgtacattggtgtgttgttcggagtcatactctgcaatattttgaacgaaccacgagttggagaagtggaaaaccactcatgcatgtaagttttcggatattcccgcgaggcagtcttcaccatgcccataaagtagagaccacatatttcgtctagccttaccaacgttttaacagaggcaaatgcactgtccgcaacaacggttctcccagaacctatataaggctctgagaggcggagtaccacagcagtgccctcaccaaattgcgcgtaaaatggtttctgcttctgacgctgtgcacctcaaccaactctaatcccagcaatattccagagtcgccgtcggcaatggccttgatctcagccccgatgccttccggcttccgagggatcttagttttgtgtgggatcccgtcgtggcagtgtttcccctccttgccttgccatgcactcatgcattcatcgacgcacattatatctcccggagacactacatcttggcggcgactgttatagccaacaactatcgagcggatcggcttccacagatcatcggaaggaatatcatccgcgaacgacagggcgctggagatctgttcgaacgtatgacgagaaatacaaaagcgctcgccgaaatttgcagcagttccaacgaagccctctgagacttccttttcccagtaagctcgcagcgagccgcgtcttggctccacagccattgccaatcggactcctaaaaacctgaaaaaatctccttctgcaatagcacgctgtctggaagcaatcaatttcacattggtgtgttgaagtgtgctctgaatagtcgaccaagggtacatcaaaaagaagtacttgataaacgttttttcgccgagctgcaacattcctggccagcgaagctagtcgttcgcttgcgaagtagggctgctgggtcgacaagaacacttgagcagaactcccacgagcggttgtgtgctagaactttaccatcatcagatattccagacacaactgctacactgccagtattcccatcggccaactcgtcttcttcggcttcttgttcctcgtcgctggcttcggactcagaagaggagggcgatacatcgattccatcagccccggctgcgctcaaaagaagctccgtcatcgactcggggtgatggtgggatgcctggggcagcgagagttgacttctagttgcaggtacagcagcaatagaccgagccgaaactctgtccacctttccgctatccccttggacatcgtaccaaggctgaccttgctggtatcgatcgccaagatgactccttgtagatctgctgtagccttcgtcttgccttccacccaagttccgacagcgtgttttgtcatcaccaaagttttgtttttgactgcaaaatagacgccaactccttgtgatctctaccttatttttgaatagtctaagatacctggcgtcgaaaactgaacccgttacagctatttaaaagtgggcccacgcgtgggctcgatgggggataaacgttaactctattccgcaataaaatatgttggctgtatgagtctcgtgattttgagcgaattggactcgctttagttcgcacgtgcgctaaatgtgctagctaagcttgtttagctgtcaattatgagcaattatgagcccccctaaaaatgccatcaaaagtttgtctccttttggaatttcccccgttaacaaacgtaacccctttatcatgagatcattttcgggtatatttcagaagtattagaaaatatcgagttctaaacctactccagagctacagtaatttttatttaagtttcatgggatacgatacactacaatgtagtgcatggattctacatgacattgccatgtagaatcccgaaacaggcaacgagtttgctgttgattcctgtgggttacaatgaaaacatcttaaagttttgaagatttgatttgctttttagaagggataattggtttggctgctctgggtacaataatttactaagtatttgcgttggggaaagaagggttgtgtgagtagtccattttttaatggattactaaagtacgaaaaagacagcaccagtttattgttccaatcggtaaccggacaaaacaaaacatactaccagtagtggtacaatacagatgatgactccacgacagagggatcatgttgtacttcgttgcgcacttcgtgatcgaacggtggttgtatgttactatgttacgcgtatgtctggtcgaagccgtccttacttctcgatttcttaataaccaacaccttcgcagtacccagtggccgcgttttcgagaaagcatgcaggttctccgggtcttcgcagtcggggcaacctgcgcgttcatgctgactgttgacgcggctagagcgcaaaagcacccgctcaatgggtggtatccgtgctccgaggtcacttttgcggtagcagcagagagaccaagagagcaaaacgccgagtgtgccgtttactccgctcccttatgccgccccggaatctgcacagctccagcgtcagtgaagccaacggttgacattttcgtgaagcgtcttcctgctacagtcggcaacgtcgcaaaagcttcgaatgcatggctttttgaaggtggacccggcttgtcctcagtcaatggtaactattacactttgtattataactaatttcgtaagaaaaaaatactgactgatgatcgttgcttttgctatagtggaacgaaagatgatagatctacacacacgacttggaggagcgttcaatgtttacaccttggaccaccgtggcactgaggcaatgacttctgggtctccacggggccgcgatattgagccgacggagattccgcgagagacttgcatacgaagttcggagacctcgccttgttttcggtcactagcgccgcatcggacatcgcgtcgttcatttccgactactcgaatggggcgggtacgtttgtctacggagtgagctacggcactgtgttggtggggcgactcatgcacctacagccagccactgtgaagggctacattcccgacggtatcgcaacgtcggctggggcaccaccaggcaagtttggcaagttcttctccaagtgggaagtggagtacggtgaggtgggcgagcactttatggggctatgcagactggacgagggctgcaaaacgcactcccgtcagctaatttgtcgtctgccctgaccaagttcgataatgatcgtaactcaagttgtgccacattggtgggtggtggggtcacgagcaccccgccgtcctacatactgcggtcaacgttgggtaactttttggcaaacagtgatactcagacgctgatcccgccacttgtgtacagactaaaccgttgcgacgcgaacgacgttaaagttttgacgcagtttttcaagtttttggagtcctccccctcgtccgacgtcatggacgatctgaagttctcgagcctccagtactacctcaccgtattctcggagatgtgggagacacctgcaccttcccaagcccagatcgaagcgcgctttgccagcatgagcataaccacgggaaattcttacgaccaaacggcgttgtattgcgccttctcgaaagaaaaatcggcgggatgcgatgaactcaacctttgcagctacgacgctcacggaattatttaccagggggagcaaggctgcaactctcccgagcgacgtcagtgtgctgcttctaagcggcaagttgggccctcagaccctgcataagtatgcggaatacctgctcgcagcacttcagaccagcaaaaaggagctggttacctttaactactcgacccacgacacggtgaactcgactccgctaaacgacaccagtgaccccggtctgacctgcggcatgaaggtgttgacgtcgtacatcagcaactctggtgacttgcagcatcttgacatgtcgtgcgttaatcagatgccctcgttcaacctcacggtgccgtcgaaccacctgcaagatttcttcagcacggatgaagcctacgatggcaccttccaagtggggttgagcgccaattagacggagatggacagttcagcacgtattttgacatcgaagcaccaccatacacttgctctaatgtatccaacaccgttgtttaggaactttactgtttgccgtgcacacttgatgccatgagatgactacggggccgtgcatggtctaccgactgaccatttcgcacccaaggactggtattcttcgcttgataaggtaaatggatgcatgttcacggaaacataacaccgggctggactttaaaaaaaataacttgccaccttgacgtgcacttggtagcttgaaaatacttgaaaaaaacctggggtttcgaaatttaccgttgcaaatactagtacgtagttgatgtccttagcaggaagttggctgggaaaaatatcaggaacttgaattgtatcccctagacgaatacggggagctggagttgacttgtcggattcgagtcgtttaataccttgaaaagcgaactgccttgaccgaacggcactcaggagtggcagcaaacgcgaaaattatactcaaaatgcttgagtccagatactgcgccgcgcgcagattgctggctctgttgctcacgacactgatcatcgcacatcgggagctcttcgcaagtttcttcttttgcacgggtagcggcactttgtcaagcgcgttgagcgaatccacatagtcgtcagtaaaaatgatcagctgatgctgccggtagatgcgattcggtgacacttccagctccaccaactcgcgggacattctgttggctggatcactcatgtgttccaccaggttctccacaatttcactccctcgaatagccaacttcttgatcccccagctccgtagagcttccgtgtcgtagcccaacgtcacattccagtcgcgtaaagtgagctccttcaggtccggacacgcagccgccatatcattcagatccagctcaaattgtcggtcgacaaggcatttgaagtcgagcgacagcgtgtgcagcccctttccgatcagcccgaatagacttgaaaccactccgtcgttttccacgtcggtcagcgtcagacttagcgatcgaatgccgcaccgaatccccggattaatgcagctatcctgaacgaactcagtcactccttcgcgcagatccagttcgcaaactccatagccgggaacgacgactttcgccacatcattcacatgagagccgtcgcagtttgcgcggaaattgtaatcttgagataacacgagtgtcgcgtcccctgcactctcgtatccgttgggtcgaactttagttcccttcttcacgtccacgtatccatggttggttgctgacaagaacgtccccggtcggagcgccgttgggttggggaagttgcttatcagcacgtgagcaaccgcgagcacgtgctcttccgtcaagttgatccgcgaaatggtcaacttctggacggaggatatcgatgcgccgccccagaatgcgtacaccagccaggaccagtacaccgggtcattgtaaatcccccggtcagctctcgctgctgaaattgtcaacgatcttatggccgtcgcctctgcaaaggcggagaagatggctccaaatcgcagccccggggtgccactgatctggacgtcccagttgctgcacttccccgttcgcgtcaccattgcagccgagtctcccaccggatagcccagcgactgaccgccaaccaacgcactgaataggaaacctgcgttcacagtcccctctgcacacagcacgtctcccccattggccagtttgaacgccgtcatgtccgtccgagcgagcgccgccgtcaccccccctatatcctcgatctcctcataagtcgccgctgcaacttcagcctcgtccaccttaaccttcgcctttgtacgtttcgttgccttcttccacgtctctaagagcgtgtcatcaccgccccccaccgcctccaaatgggcaacggatggcactttcaactccaataaattgttgaattcccgcgacaaaggacccgatcgcttcctctgcagttgcgtcaccaccttctggtcgcctcgaagttccatgacggcgttcgacacctgccagaagttggacgcgacttcgttgtggcggttgccccctttccccactttcaccttctcgagcttcgtcatagcggcgcggaactccctcgagccctcccacgggtccgagggacacccgaagagctcgccccacgtcactgcggacttcttggcgactgggtcgctggtcgacagagcgccaatgaggtggcactcccacgtgggccacaagacgtgcggcctccgttgcgtgcccgtccggggcggcagcgggtgccgaaggaactcgcacagcagcgacgcgaacgcctcgttgtccaccgccgcgagtcggtcgaagagctccagcgactcccgcacgcgctgcagtcgctctctgtcgcgccggagcttggggtcggaggggaagtcgacgcggacgaaacacttgtccgccgtcacgaacttctggtagaagtgccacgcgtcgggccagcactcgatggcggcgaccaccacccccttgtcttcgtcgtcttggtcttggtcttggtcttggtcagaggcggtattgggcaggcgcaggaaacgtgcgagggcgtcgagccacggctgcaggaacgaacggccacgttgaggttggtgccatcgtggtcaaaagctgaagtgaggcggaatgaaaaggatcaaaggttagcgttacttcagcgtaatgacgcattagattttttttgtcgcacctagatttatttatttaaaagtttatgaatgcttccagatacaagctgttagagaaaatatcttgtttccaatttatgatcagttcgcatttttttcttacggggaagtaaagtgcatgaaacttacagtagatcgaggacatgccgggtccgccttgaagaaaccacgcattcgacgcttttgccacgtcgccgactgtagcaggaagacgcttgaagaaaatatcaaccgtcggcttcactgacgttggagtcgtgcagattcccgggtagcacaagggagcggagtaaacggcacactcggcgttttgctctctcggtctctctgctgcttccgcaaaagtgacctcagaacacgggtaccacccattgagcggatgcttgtgcgctctagccgcgtcgacagtcagcatgaacgtgcagagtgccccgaatgcgaagagccgggagacctgcatgctttctcaacgaaggcggtcactcagtactgtgaagttgttggttgctgtgaaattgagaagtgacgacgccaagattaaactttaaacggacatccggacacttgaggcacgaatctgtattactctgtcgtcgagtcatcagattgtggtacttatgctttgtcctgtcctgtaagcagcatatgctgaatgagctcttagagcatctccaacggtagtgcaaatcgcaaaagtgataaggcaaagtgaatggccgattagcaacataaacaagacgaacacgcttgaatttttttgcaatagttcagtttccccaacggtattgcaaaattgcgtagtgaaagcgggtagctccctccgcaatgaccgataaagggtagcgtagcttaagttgtccgcggcaaaggcaccacaataggcaactatagagcacttcaggtcgataacggcccgccgttgtttgcagcatgcatttgggacaacaagtcatttgttctacatactgtagcaactgccggtaagcccgggagtttctattcatccggtgtacctatgaaactagtagtatatgtattgtgagagcgttgtgtacctctttcggacgggtgcacgtccataaatgcgtattctcgccttgcactttgcgtgcaatagctggcaggtcgtagtgaatagcacgccgataatctctacgccatccgggaattgcactatcgatttcaacttgttactttctgaacccctatcacttccccgttggggatgatttttttgcaattttgcaaatatcgtgcaattccttgagttttgcactaccgttggagatgctcttcacaatgctgaaataatactttatgaatatggtatgggtaaatttcaactctctaggtaagtaagaaatcgaagttgttgcacgcagcagcagagcctaatactcaatacttctctgtcctggctattatttactttgaagacagacataaggagcctatttatttatttattttagcccccccccccccgaccgatgaggacgattaaccacagtagaagtttcacgaggctcatggtcgcgtgaatatacaaccccacaatagtctcgtttgcccccatagtaccgcacgatgacgatatttgttggcgagtttatacatgtactctgcagcgggtcactgcgtggtctaaaaggcggtgcattgcttacattgcaatttgcctgcttaaaaagaaatgcactgctaagtgctatcaaacgttcgaaataagtggcaacaatgcgacttcgtaaaaaaaaaacagctgataaaaaataccaattattacataccgctgatccaaccgatacatgtttagccctcctcaacggcttcttctaataattttaacgctttatgcccctataggtcatattaatccagaataatcatcgctggcttcaaaggcatttactagttttaagcggtgcttagtctagagttgcttggcagtggaatcccttataacttcactgatcttttaaaaacactagactgacgccagtacaagccccaattgtattttcttcactttgtgacaaatagtttgtaaagctctctgtacgttctgtaataacatgttgtgcccacaaactgaaactgaaaacgctgcttgcgtgactaagagtcggtcaaggaaaatctaccgtggagattgggcacctaccgcggactcgtatcctagagatcttgcgatgcgaccaccgtaggcggagatgcagcagtgcgcgtctccgggagtaggtagccgactaaaccgcaacaaattcaaattcaaaatctaccgtggagagcactcaccattactaataggaaataaaacctattcataagcttccacaggcgcttccattgtaaaaaatattcgagtctcttcgatgtttccaattttaattggaaacatcgaagagactcgaatactttaaaaagcagacgcatcgtcttcagttggatcatagtttgtttacagacaaagtggtagtaccatttatacagtttaggattccaacccacggatctgtatgaccagcaccaccaaggttttgatcgaagggatgcagtgtggacatttttcctcgccatacatgcactgcagtagcattctttctggaaaattttgcacatcgtgacgaagatgtcaattgacttgcgaaaacgtaagatggattctgcgacggtatcaaggcacaattggattggctaaaagtttattgaagtgccatacataggtacagaggtcacgtgcagtcctatcgaggccggcaggcaacatcgactaagcggtgactgcaacagtcgacagccgagttctaggcggcgacttcacgagctaccagatttgtgtttgttgttgctaaatggctataaaacttaagctaacaactttggctttaggataccctctacgccagcaaggtttgctagctttacactccgtcgcactactgggatcagctcgactgcactaacatgaatgtaaatgtgtgtactgtttgaatatagctactactagcttgcaaatctcggacaaccggactggcttgtgtgtctctgacgcttgggcggctgactgtcttcttcgtttcgctcttgatcggcttgtcggatgagtttcaaaacagttgtaagcttaagctgttcagctcttcgcttacgtttgcttggttttaaccgcagtgtaccgtatccaatgttgtaaagctcaatagcgtgtttcttgtcacggatttccggcataggtgcgtccagcttggcctcgatcccattcataatgtgccgcatcataattgaccgttctgacagcgtcgcttttttctgcgatgtatccaggtcgtccgatggtattcctttgtacgggggggggggggggtagttgagctttagatttccgaaccaccatagcatccatgccccaaggggatcgatactcggaaaactaaattctctaggtagcacatgaaatttcccgccccagacatgatactggtgcagtggaactggcgctggcactacgacgttgatcgacggacgttggtgaagcccaacttcgtctaactacgatcgaatttcctcacgcaataactctctcgtaatattgcccgctgccacaccctttttctcaagtacatgctccattctctgctccagtttgccaggcagctcatcaattgacctttgctgctggtcaagcttcttgtatagctcaatataaggcggtatccccgttggtcgcatccagagagactctccagcaactaattggccttcaagcgtcctaaggacagtggggcttgtaaacaaatgtgtcgaaagtaatgcatgggtggccggtaaatgctgctgcaaatattccgcgtgatgcacgagtgatgctaggcacaaccgcaaaattcctgccatattggcttcgcgagagagaaccggaaacatagtctccacgcacgatttcacatttttatcggagccatcctgaaaatggggcggtaaagtagcgaacttagagtcatttacgggaggtcctgccactactcgccccaggaattgatctcctgcggcttcataacggaaaaagcgattttgaactccaccgaggctccatccgcagcgaagacacacactcacgatcgagggaccacctgtacttcctccacaagcaaatgtagccactccattgcgcaccgagtgcgtaccgtaatttttaccagcgtctccttacttcaaaaggttagccagcaccttgctaaatcgtagcttctggttagagcctggaaatagtgcccccggttccaatcgacggtggcatgcaagatagattgccaaggcagtcacccagcacgttgatgggctcagcgggttcgcgtacaggtggcgtggatcacggggccctgaaccctcctggttagtcttcgtcttcacaaatattactccaacgctatcgtctttcaccacgagatgctgactttggagagtctggaccgacaatgagcgacacatcaaattccactgcgaagtcaaaaaaagatgcgaaaacccgccatcacccgccacgagagtcgaattgcacaactccttataaagggagtacgtgagtggctgctttcctgatgtctttggggtgctagtctggtcttgatcagcctccatccgcttcataccggagaacagttgcttcatatcatcaccgtactcaggaggcagcgcaacgtgcttcacgcgataaagatccttgatagcacttcggtacccgctcagcgtagccgtcttcacagaagcactcttgaacaccagaaaacgctcaaaaacactcggtgtaaactcacttagattaatgtcatcatcagcgtcgaaaaacctggcgatattctcatcctccttagcgagctcgctcctgatccacttcttaatcccgttgaggctgctcttgtactttcctcttgtttgcttggtgacgcatgcatcgcgtatcgcctcgacgtcagcatgactggtactccgcgctggagcagaagcgcgttgcgagcctccatcactcatgttgctgctgggtcgatgttctttgtgtgttgctgtcaaattttagccaatgaaggacttgatgtaagcgtcggcggctcccgcttacgtttgctcagaagaactgtatggcaacgttcgcataatgaaagccagtcaaatcccgtgaggaaacaaacatttcctgtaaaatgtcagctgtccacgccgacgacttcgcaggaacccctatacgctacttacgaaagcgaaggaatctgtattcccacgcaatacacgtttgcgagcacaaaacgacacaagcatttattatagacatcatatgctcgtgcctctctcctaactttccaatttgggctgaagttttcgagcggaatacgaagaatcatgcgcatcgtgctgctgctcgcgcttacagcccctatatttgaccgattcaaaccagccatggattcaaagacaactgaactcagtaaaccccgtggccaattagaaactgacataaagttaaatactactactactgcagtagaaattagaaggacggagaccaagatttgtacagagaccgctctcttaggaatccggtctttagtacgataccttaatcccagccgtggtatactacgcacgagatgaatacatggtatgtatggctgctcagcatagaagctttcgggaaggaaaaaatatgtatttcgccattgcacacgcatggcactatcgaagcgtttagcctcatatttaagtattatctggctgcattggttccataaccctcaggggccactgctacgcccttagatccaccgaccgcgccggtgcgccactatgtttcctctgcaatctggtagtcaagtactgtatcgttacgatactatcgtccatgaccaacccccgtgttcgttagcgtgttaaagcttaccgtacccggtggagctgatcgcgtggcgtggtcaatcccgtcgttgattactgtagagttataccgggcatgtgcactactgtacgagttctggcagttgttcacgcggttgcgaccaagttcagcgattgcgtgggtgacccccatcggatggtaagtagcacacgactttctatggcaaatatcgccttccctaggtgttcctaaggatacatcgggccgtgtctacctgctcctaacaccgtaccagctaggtctgaatctcactttcaatttttccgaccagcttctaagaccaacccaccccatgcgtgtcgctccagttttgttgttgatcgcggctacctttttggctgccagcgaggctctctcgaccaccacggactccaacaaggtcaagacctcccaagtgattttgcccagtggacccagcctgcggcttctgaggaagcacaacaaggttgtcgacgaggacgaggactcttccgaaggaaggactctcactgatctgcaaatggcggaaatggagaagttcgccgagaagctgggaatgaattgggcaagagtccaaagtggcacaatgtacttgcaaagacacgcgaagtacgcggaataccaggagacgatgaataagtacattgcgataaaccaaaagatcaaggctaagaaggaggaagctacacgaaaggctgcacgcaaggcggcgcgccgacagggataaaaggatacctcaaccaagctggtccctgcgaggtgctggttcaagcaacgtaaggaaacgaaccgattgcaatagtagattcatggaaggaaatctattgctcaaaatcccgttcgtcaggttttcccgttattattttcatttttcagtgaggtacattattgtcacttagacgactaccaatgcccgaaactagtgcagacgtctcttgcccatcttgcacatctatagcggtgctgtaaaggcatccgactagatccccttggttagcttttttatgatcttattctgacatgacatggcgtttgttctgaagattgtgggaggaatgacccacttttctgctgaatctgagcctgaaggcactttatgttgaccggggtccagataaacacatgaggtaacgggcccatttggcttcaccttgcctgccacctactcatacaaccttgtgaggtttgcttggtgtccaaaccttgtgcatgcagcaaacaagctcgcagttagcgctgctcacactgtcatgctacgtcgttgttacgtcgctacaatcgacgtcgcctatcctgttcgcatatgtacgatttgctgcaccgggactatcttgattgttgtattggggagggccagatccaaatccatgtcatgtcagaatacggacacagaaaattctaccgatccccttgcataccttacacggtactgtccccaaactccggagagttctcatcaaaatgccgtgacagccaatgcccaacgtcgttaactgcatgtgcgatcgcgtttgaccatcggttatccaattggtccgacttcagctgataactccggctggagtccatcgccacattcgctaagatatctgcggtcttgttaaattcccgcaagtggtggctccagctggagactcgagccttgtcggcgagtcggcgactttgccaaaataacggccgaaggtgccgtgccagaggagatttgcgtgtcttctgttgtcgaatgatcatggcgctatcgccgattacatgaagcggttctcaaccatggcgcacacaggctttgagtccggtgagtagtcccatattttctgctaagttgttcgtggtagatggcgaagcataggacatgctggccaaccaacagacctgaagctcagctatggaggcgccaattttaactacaaccgctccactgccaccagatccaggattccctctggagcccccgtcaaagaagagtaaaaagcgtctcctccccgatatcacaggcacagacaccagagggctagacgtcatcagaacttgtcggagtaccttggctgctctggtcattgccgctgcattatgcccagcacgtaaatctagcgacaccgtatcgtagccagtggatgcctgccaaatatggcttactcgagcggcttatctgcagtgatatgtcggggtcataagcccgacgtaaatctgcggagacacgaaatcggcctcgataagcggccctaaccctacctttatgtcgtgtagccatcataaacttttatcttgctatttgtattgtttaacctgaccatcattcttgaacgtgtttccttcactctggtggcttatcgcctcgattatgtcttcctgccgacaacttgaagttgcgctcacttttgaatcggacggcgaaggcgcgaagtcgacctccgccgactcgcagaaagttatgcgtgatgctaactgatgcttttgtacgtgctgtggctggccgtgctcacgccttgcagggacattgtgcacctcacgcactccgcgatccattggcagctgcgctgcatcgaagactcgtccagcgacgagaacacaccgccgaacgtcgctgtggcgccgcgccacgaccacagccgacggccctgcggagcagacggcgacgcgagcgcaacggggacggctacgcctccgtggctgtctcccaagcggaccaagcgtcggtccaagagcgcgacgaacctgccgtcaccagcgacgccgccaccaacggagacgcgtgcgtgacgaagcccgacgacttcctctccagtgctgctggagacgccatcaagagccccgtcgcgcccgaggacgacaaagacgtctcacccacgccgccaaggccgccaagcacgccgagacaccgctgccccgtacgctcgccaacaccctgtgctccagcgcgccattcgtgctgctgctgccgtgcaggcgacagctccgtccatggtggatctggcaccgctgactcgacggcaggcgtcgcgaccgggcgacatcttcgtgccagtacgctggccgtacagtgttgcgcacttgcgcgacaacttcaacccgctggctacgatctttccagcagtgcatcacttcgggtcctgcaactgctggaactcgtgccgcgcgaactcctgtcgcaacgagctgatgcccgtgttctgaagtgcggcaacggccttgaagattcggccaaggtgttcctcggccacaaccagcgcacgcgtgagttgggaatcgtggccggtgaggacatcgacgctggcgtagtgctggctcggggagatagagcacgtaagctcttctcgggccaatcgaccgcgcaaccagggctacaggctcgtgttgaagcagcggccggagaagccagcaaccggcgtctgcgttgcaatcaacgcggggcgcatggagagcctcatgcggttcgtgaatcattcatgcaggccggccgcggcgttcgtcgagctgtctaacggccgtcgtacgaccgtggtggtggtgactacgcaagatatctgtcgcggcgaggaggtgaccgtggactacggcgacgacctctcgattgtctgccgctgcgaggtcgccgagtgccgtcacagcgacatccaggacgagcaagatccatgaacacattgctggcgggccaagggcgctgcgtgtaggtcgtttccagtgtaggtggtttgtgaggattatgcatggatgaatgtggctgaaagatgtgagtttattgttgccttagctattcgaattgactgagatgaggcttacggggaatccgatgtgggcgttgtcttcgacgtgggcgccgagacttttggcgccaaggcgcttccgaagagctgtttctatgttttgaacgcgaaggctgctactgaggcggcactttgcgcgcgcagatttcccgtgttgaagttcgccgagggcagcgtcttttgaagatcggaggcgcgtagctggtgagtatggcttgggctagacgctctgcacgccgccacggtcgacagattcgctcagtttgctttttgccagctcccaagcactccagtccaagcccctccccgtcccctcctttccaagctccatccctcgtgcgtcgaccccacttgagcttccttccttcgctcgctagctgtctgactgccgttacgtgtttcctaaacctacagatgggcaagaactccggcagcaccaactactccatgttcgacatcgaccgactcctacacctcgtcgagcaagcgctcccgcttggccgagacgagtgggagcggcttgccgtgacctacaactctgctcgcgcccgtggagcaccggagcgcgacttcgagagcttgcggcgcaagctcaagacgctgtatagtgctcgcaagccgccggtatgccagagatgtcgccacacatcaaacgcgcctaggaggccaagcaggccattgacgacaagaccaatgtcatcgagatcgacgacgaggccgaccacgaccaaggcttcgtggagcccgacttctcgttcgaggctgaccccgacgacgacaacgtgcagcatgattcccagggcagcaccggtcacgacgagcccatcgagacggatgagtccgtcacgggcgactccacgagcttcagcccccacccagtcgaggcgagttccaggacctgctggcggcacctcttgccggcgacgagctcggagcgcgtgctcgtacgcagcgtccggcgccgcttcgagcacctcaaaacgcgcggcagcctggcgctggaggtccgccaaagcaacgcaagagctcttccaccgtcactgcgagcgacggcagtctctcgacgggggcgccagtcgaccaaggacgctcatcggggaaccccaagaaggaccagaagtacaagtcctcctcgaaccgcctcggaggcaccgacctcaccagttttcgtgatgcagtgggcgccaagcgcgtcttcgaggaggacaaggaaacattggaggccagatttgcgaaggccaagtgcatcagagccatgaaggccaccaccgcgctgaagaacaggttgagcggcctcggaagcaccgccaacaccatgggcggcagcatcatggagactgtcttacttctccgcgaggaaaacgagcggaaggccgaggcgcgtcgtgccgacgaggagaagcggcgtcgcgaggagaaggccgaagccaaggccgaagcggaggagcgtcgtcgccgagagaagctggagatggaggagcgcgctcgccgcgatcgcgaggaggcgcgtgcgcgcatccaggagttgctgatcttgatcgggcgccttgaagaagaaggattgaggcaaggatgacgtctagcggaagcaaatcgtggacaaggtagtgaggttttttcatttgcaccgtcttagcgtagctcgttgctttaaagcctcaccaatgaactactcatgttgctgtacgtactcagattgatgcacatgtaagccttgctgttgcaggacatctaacaaagttcgtgctggcaagccttccagctgcgtaatagatctacagaaagcagcatcattcctacgcgtactcgctcaaaaccagcaagaaagttgaaagtcaatgaatgcctctgtcaaacgactccactacatgtattgaaatgtattacaaactagagactagtcatccaggtgtgcaggcagctccatctcgcccgagaacgtcgtgcgattttgagagatgcccacagtgcgtacgcggtagttcaccaagcggaacagattgttcagtctgaggccacggagtgccggctcgtaaggtagtggtagattaaggcgactgtaaaccttttgaacgcttcccatgccctactccgcagcctaccgcacagaggtgatggcgttgtggatggtccgcgccgagctccgcagcgacgggtgcaagcgctcgaggtcgccgtccttgagcggcgtaaggatgcggccgaccatggcggtggagcatgggaaggctgagtccgaggcgacgttcttgcgcgggtcggggcagtacacggggtccagcaactagttcctgaagcccagcgacgtgtcggagtcgttccatgacccggggcagttgtgcttgacccacacgatgcatccgtctgccgcgaagcagatcgtcccggtgacaaacaccgagtgcagccagccattgtacatggggatctgcagatccgcgttcgatggctgctggaccttcatagcaacaaaacgtagctgtaacttatcgcaatacaattcagtttcataatgagcgttgcctgtgccttatagtttttcccatcgatacagccgaaggtatgcttcagcagaggatctcgagcttcgccagctcagtctggcggctgggtgacggccatgcgatgcgtgcgggggcgtagttgtccagtgtcttggacagtgcttcctcagcccgtcgcagggtccgcgccaatgtactcggaggaacaccgaacagcatgatcaagctgctcagctccatggagccaacatagaagcataggaccagccccaacacctaatggtggtatcggagcttgagcggtcggcccctggagcgggcgcgcgggatgtggtagtagctagtgaaccggcgcagtagctggtgaaaggaagacctgtatcaatcatagcattcatgtactgttagtatacgcatctgatgcaacacacctgcagttcaacgtacttggtaaggctggtgggtttacgaagttgatgtcagttccgtatctgtacaggaccatccacgcagagtcgcagggcatgtccaggcattgagccgtgaggtaatggcggctgcgcatcgccaccttccatgcctcctcgaccagaggcggaagacctcacggcgagcgacgtgcagcgcctcaccttgcttcactatggcgtctgtgagcagcagcagcacgtccgcgagaggggcttttgcccgacgtgcgcaaaagtcagaatgaggaaatctagaaggattcacgcgctcggtgtctccgaggcaaagtgatgggtacactcctctttgtaccaacgtcactgtagcagccgccctatttaggacactatcagtccgacacaggtagcacttttaacacctttgtggtagagattttttgcgataaagcgacatatatcttttataagtcgggcttaatcgctgcagataagccgctcgactaagctatatttggcaggtgtccagtccataatctcgctgacagtgttgctttatgatgagcgtcggacacgttgtttagatcatcaaaatgggccactctccatcgccatacaccgtgaaaatacagggccgctccaatccgccaacaactttctaccatacgcgtgatcgcttcagtgagcttacctcggtccactagcgacaaaaaggggaacatttgttcggccgagctccaaatcgccgcggggacaacccgtagccgcagcgagaacatatcttcttcaacagctgtaaggggcaatccgagtgtcctccagcgttgcaggaatgtcctccggagaatgacagcagcggagcacgtccagaagacgtggtgcaacgttatgacaccttgcttggcacatgaaacatgggggcaccccacgcattgtttggtcacatcatatagggaaagagcgtgatttttaaggcgcatgaagagttgctccgcccatggacaggttttcccgttatcccaccaaacaattcgtttttttataactctgttcaagcactcgttaaaaaaacacatattttaataggtggtattttttattgtccgaagtatttttttaaatattaaaatacttcggacaatatcctaacgatttatcagttctaacccaggtccctggcggaaacaagtttacttcggcaccatggatcttgagtgctaggaacgcggaaaaagcaggtcaagaagaccatacacggaagccacagagcacgaaacgaggcttagttttcctggcctaatcttagtaagcggggcgtcaaaactcgctcatttggcgccaaagattggcctaagtctgcagaatctagcttttagactgtggatggacgagccagtcgttttctagcagctaaatatgaagcaactcataaactcaggagcaaatctcgacgataactcgacgttacgttgctggagtggcttcgatacacggtcgcgtacaaagcgaggcatcccgaaggctattcgtttcaagacggctagagagagagatctgatgctgacgaaaagggtgccggaagctgaggtagcgacgtttttcaagtctctgaaggataggtcggatctgcagacgctgggcgagactcttcagaacacacagtactatgtgtggcggaagacgggtgtgttgccgaaggacgtagagaaaatgttggggatgaccgactcgatgaaaatattcgacccaaagtactagtgtgtcctgtcactgtgcggcggggcatgactcagagctggtgagcgtcgtgatcaacttgacgtagtcgttcgtgtcgcccaccaaggacaagtcggtggcggaagtgtacggcgggcggcaggcggtggctgaggcgagtcagtcggctactgccaccgccacgaggaccaagttgaagaggggagtctgcagaagatcgcaggagggcgacacgtcgggcagggacaaggagtgagtgtgcgaggaggcgaggtgacgtgagatctatgacgagcggccaggaggccacgggagcggtgatgagacgtgaagagggagagggccaggtaggttaggaaggcgcccaatgtgtagatgaggtagaagtaagcggggacaacgagctgcggtctggcagctcgaccctcagttgagatttattgcagaactgtagcaggttgagactaaatacattgcgttgcgaccgaagacacaggctgctacgttagtgctgagcgagggcgacggctagctgcgagcagtaagaggaggtaagcgaaggtaggcaggcactaagatgaggggacagtggcgagttgggcggcgggaccgtggagagagaccacgggggtcgaggtgcacgagtagcgccttgaccgaggggcgcaagggtccgcgtgtgccctcgggcgaaggacacctgcgtccgctgcacgttaaccgggttttgctggaagcagccggcggggctacctgaccgtcggtgccgacaacgcttcctcccagccatccctatccccgtctgggccataagctgtttggtcaccactgtgcggccccgtgccggttagccgccggagctaatgctttccgcctaggtgtcggcgagtaggtcgtcaatgcaacgtaatccgtccgtgagccgacgacccgtaatgggattggaggcctagcggcgagttacctacaccaccttcaattcaacttacttgtcgactgacaaattcttctaagatgcttcactgatgttgaggatagaatcattcatatttaattgtttatgttgtgaaagtgctgccatatgcaacaactaaaatagaccactaaaaatgaccttccgcgctctatctcttcgtgtggttgatgtagcgcagggacagcatcgacagcacgcggaagataaaaatggccgcgaacacgtagccgaagttggaccagcggtcgttgtagttgtagctgaacgtcccctcgatgaagcccttgaccgtcgtcgtgtgcgacacagtgatcggggcctcggtcagaggttggcagccgaggtttgagccgatgttcttgtactagcttagcgattcgttccacgtgggctcctcttggcagtcgcagaagacaatcgccgtcaagatggcgacgctgaaccgctggggcacgatcgtgtagagccacttgtagccctcggggatggacgacgacggcgggttgaagcccgcgaacagcaggaagatcgagttgatgagtgcgcccatgaccgcagccacttcgatgctcgggaacgcgtggatcagcagctgggcgaagtacatttggcccagcacgaagagcgacacgtgcacccagtagagcaccgccgtcgcgaaaccttggaagcccaccatcgggtagaagatgaccgtgaacagcaggcactggccgaacacgtaggggatctccaccacggtcgtggccacgaagtaccagagcgagttatagcactgcgatgcgcgctcccgatagaatgcggcgcggtcgttggagtacacggggagggtgtccatgaatccagccatagccatgaacagcgtcgacatgaacaccagaccaacaccacccattaggccgctgtacgtcgagtagtctacgctcaagaaggccaagccgcagatgatggcgacgccgagcacgatggcgaaccgggtcaagttgaacgccggtgtgcgccagtagagcgcgaagaaccgcttcatcaggaagtacagctgcgtcgagcccttggacgcgcgcttcttcgtgaacgtcacctccggccagtcgggggacactgtcgtgatgccaggctgctgcagcatgtcgtccatcatgcgcttctcctggctcttggagaaaatgtcgacaaagtcgaggtctcgagcgcgaccgctgctcactccggtaccgatcacctcgagcatccacgtcgcggggttctgcttcggtggacacggcttgacacctgggattgcctccagatacttgaccagcttctggcatctatcgcccaactcgcctacgaacaccgactgaccgccgcgcttgagcaggatcaggtggtcgaacaggaagaagacgtcggatgacggctggtggatcgtacatacgatggtccgtccgctgtctgccactttgcgcactccgtccatgatcaccttcgccgagtgagcgtccaggccactcgtgggctcatccaggaacaatatacttggctgcgcagccagctccaccccaattgtcagtcgcttcatctgctcctgagagctgccacgcacaatttggtccgcaatgtcgtgcatgtccagcaggtcgaggcattcttccacggtgtcgtacttcttgctgtcgggaacgctgctgtcttggcgcaagaacgcgctgaacgtcaacgcctcacgcatcgtggacgcctccgagtggatgtccatctgctcgcagtacccggtcgcacgacggatggccaggtcattggcctcacacccgttcaagtagatcttgccctggatcgtgccctcctttttacgcccagcgatgacgtccatcagtgtcgtcttaccagcgcctgtggaccccatcaatgctgtcaaggtgccacgcgtagcacaaccgttgatgcccttgagcaagtcgtgaccctccttcgggttcgtcgggtcggggactgtgtaccacaagactgtgaacgcgatggtgacgcggacgaagctcttctcgcgtcgaggaacgcccaccatcacgtcatcgtgagacgtgtccgagttggtatcgtccgagtgcttgggcgtcgtggccagcgcgtagacgtcttgagcttcgtcctcgatctctttgggtagaagctgaatgttcgtaggcgccaggtatcgacgatactcgagcagatacgtgctcagagccaacaacaatacgtagaagacgatcaagaagatggcgcccgtccagagctacgttttgctcgaaggaacgccaaactggtccaggtagtactcgcccatgttcatgttgaacttggagcagtagtcgatgcctccgtactcgcacacattgtacttggatgaccggtactcgttcaccgacagcgcgcgcatgcaccacccgatcgggttgagccagtagagctattcgaggtagttggggatctcgctcttgggctgcacgaagcccgcgaaaaggatgatgaagacgatcgagaaggacgacatgggcttggcaatgtccaggttcgggcacatggcagtcagagcgaagaaccacgtcgacaagaccaggttggtcagcaccagcagggtcaggtagataaagtacgcgccgacgttcgccacgaagccgcacatccagtacacaagtgatccgaagatgagaatctcgaagacggacggaggcatcagtgcgatcgagtagtcgatgacgtacgacgccgtctggtagaagttggcgcctcgctgcttgtagaagatctcgcgggcctccatgaacacggggatctgcgagcctggactcaacgacatgaacatgacagcctgaaagatgacacccagcatcacctgcacattcgtcgggtcgacctggtagaaggtgctgccgtagatcaatcccataatgcacgtcatggccactcgactggcaacgtacgccttgttcctccacaaaatcgtcatgtggcggacgctcagagccgccgtgttctgccagaaacccttacgaaactccggcacggggtccatgtactcgctcatgtgcttctctagctctggttccatcggagcctcgatcatgccgaccaggtcagcgtaaacacgggattggacgaagtgctcggcgaactcactggcagcacgcggatgcttgatcattccgacagggagcgccacctcgtactgatgctgcaaacgcgtaccgagatccagcaggtagtcggcgatatcgcggtccggagggcacttgaaccccaggctctcgaagtacgggagcacttggtctcgagggccgtggtacataacttcaccctcgttcatgatcagcacgtagtcgaacagagcgaacacctcgggcgccggctgaagcagcgagatcgccaccgccttgtgcaacgtcttggcgatattacgctgcgtgcaaatgatgtcgaacgtcgccgcactgtcgagaccagtgctgatctcgtccatgaggctcacgtacttcataccaaactccatctcgcctgtggtcactcgcttgcgctctccacccgacacgcctcgaaccagtgcgttgccgatgactgtgttctcgcagtcctgaagaccaagctggccgatgacgatgtccgggtagttcttgtagtacgccttggccgcctccaacgctgccaggttctcctcgaccgagcccttggtaaaagtctccgcgcctttctcaacgaggccgccaacgacgaacttgtgcgcgtattccagagtctcgcgcgttgtcagcgtggcgaagtgtcggtccgtctgcggaacgtactccacgaactggggaacgcgctcgatgatctccttcagaagcacgccgttgtacgtgatctcgccctccaccgcgatgttgctctccactgggaattggcccgacagcatcttcatcaaggccgacttacctgacccaggctgcccaagcacgagtgtgatggtgcccggcttgaacaagccgctggcgttcttgatgatctccttgcggaccacgcgccgcatgggtgagatgcgcgcgagcgccttggccaccgtattgaagagcgtcggcagctccgacttggccgtgacgtcctcagtgatcgtgatgtcggccatcaccgacaaattcttgtagcgcacctcgagctgcgtcatctcgctgccgattgcgagctcaagcgtggaagccatgaagcggttgagctcctcagggccctgcgcgagcatgctctcgcccgacgcgaggctgacggcgggcagggttgccgacatggatgtgaaagatgccagcccaagcagactggtgcacttgtacttgttgttgttagacttggacgtgctccagagcgagcagatttcggaatgaattcgtgaaggcggagggtccgaagcggaaggcaggggttctatgaggcgccgctgcctggcagctcgcgtgtgcgagcaatcgcgagatttcgattgcgcgtacagggagtgctaatcgactaagggtactaaacgtagaggtcgcggtgccggtcttttctgccagggtcaagcaatcacgctggtggatgtatcgcagcggtcattctaaccgcttagcgcatcgatgctggcattgaaggaggagatattataaatcctaccaggctgagtggagcactgacagcgctgaatctgctacctgttcgttatgctccatttcgctagccgacctccacttcaactgccattgggtaccgcataaacgcgcaatgagacaagcacttcaacttcgcgcaccgaaatgcttcagttagcacacagcaacattgcatgaagctttcctagacgatatactcgcagttcccccgaaggagtctcctccagcgtctggagtataaatatatgcgtactatattgtaaaataatccagtaaatcaattattttttaccacgtttttgacgaagtgcctatatgttcttttaacttaaaaaaatctattaatctttcagtggagtatcaattttaaaattgagcttcgtacctcgttataagcggtaaaatccatttgagccataccgggggtactattcttactaacctccaccaacggtcctgtgtcgatgactcggaattggcagtggagtttgatagactggcggcaattggaaaagcttgattcatttcggtgcgcgaactaagttgaagcgagggaccctgtctcatggcgcaatcttaccaaagaaacgcgggatctgattgcggcaaactactgtctgtctgaattgtgttttgcactttagccgtacctgcgaactaagcgttgttatctttcataacccgaatttggcacccaagagcttcgtcctttcagtttaggagtcattttgattagcaatgtgttttgagccaagttcaataaaagtatggacaatcgagtagcagtccacttccggcctttacgagaatctacctgatgctatttaacagtacttcgaagcagaggtccgcctataccgtattatattgtattgggatgattgcgaagccctaatacatattacaattctttgacaaacaataataaatattgccgtaatttatattgtattggcgtataaaacatactgttttatcgatttagagggggaagaaagtcagcagctgcagatccgtatcacaatttgcattgatattcaaaattttagtagtgaagctttcaccgtgaaggctacctgaggcttaatctaacggaaaacgccaatttgtataccgcatactattgaattgaacacttgtcaaatatagaaaaatatacaaataggagggtatactaccaaagtagctccgacgcatacaagtctgaatattttatatactgtagagctagttacgttctgcaaaccctctttgatgacaccctggcaatgtatgtaccagtcttcaaaccatggagacatccataggttgcgcagagttggttcaaaacgcctgtcatgccgttagatgtaagcagaacttagaccaacaaccaaaactatttatctttgggtgccttacggtaatttgcgtaaagttccaagtgtcagtttttaaactgtggtcttcaaaaagataaaacaacttgccatatttggcaaagtaatacttacaggtaaaataaaaggtgatttcaatttcaagacatctcttagccaatcagaagatgttaacatgctaaacttcacataaatttgcagtttcaagaaaattataagtaatgaaccttctaaacggttctgttgaggtatacaaattggcgtaggtacaatagctttgtatactgagcacattctatcagatttgagaggaggtattcaattcgggaagggtctactatttggcgctatccgttacgcgtagttacatgttgtatgctcacagtattatgatagcggtcggtgtcttatcggacgctcaaagctgttttctaccggcgagcttggtaaacggacatatatatgctaatgcatacctatataatagtcattatggtatggaatacttgcttggatgtggcgttgagcaaatccatgccctcagcagctagaatttgacatcatcagtcaaaaattctatgaaagtggtcttttttcatatttattggcaataattggatcaatacgatattgtattagaaaccggggcgctcaataataaagattttgattggaaaacccaaatatttactgtattgcaatattgttttccgacctctgagttgacagatcgggtatggcaaacctcttctcgtgccctgggggcgtcggctgtctttactgttgattttgacgttgctaggtctcaagacgtgacgtgtcgaaggaatcttcttccctccagtgactgaagtacaggagaagcaagtgtgctggactcagttgccttcaacgggatggctagttgaggttgcccaaaggtagagacaggagccagaatgacagccacgagtagcagcacgacgcagtgtatgcgcatgattcttcttctacctggagtcagcgaagggcttcagctcgaattggaaagtgaagagcaaggaattatgttgtctcagtcattgcgtatgagcttagtaccgttttttatcgtaatcatgttcatcgcgtgaggatgctaaccaagatcagaaaataatgaattcccaaacaaagcatggaagttaggccagcgattaaaaaatatataagcatggaagttaggccagcgattaaaaaaatatgtaccggcatcctccgttctttactgacgttcgcttattactgacaatcaattatagccaatcaaataccttattgttatcctccatttttaactgacaacacaaaaatgggtcatttcccaatccacaagatgctacctgctcgcagacgcaccgccattacggcagcagaaagctcgaagagctcgatgcctgggcacagtgcggtggcatcaccgcggcttttaacgccttctacagcggtatagatgagttcgtccacgaaccgcggcgaaagctcatggacagacagctctcaaaaagaatgctcggacgagcggcacaggtatggccctccccgctgaagctgagcaggagctcgtgaaacggatgaatgaactgcgtggggagggcgtatgcgcttacaggccctggaagcaggcgatgactacatgtattcacagcctttagtgaagaaagtagacgttgtagctagtgaaattatcgctcagctttctagcctgagtctgatagatcatagagtttgagctgtgactgtcgagcatgataccatagagagcagctcggtctgcgatgaaacaatgagcttttttgtgtgtttctgttggtttgtagcttgtggttgagggggcaaattccgaagtgagattaaatgttatcgtctctcaaactactctctagtcttcccctcctgatttccttcttgttcgccttgtgctcgttggtgcctctcatcagacggattactcccggtatccgcttgaattgatctcagtatatatgggtctccctgaccagtcattggtgttcccagagcccggctgccgccggttctcctgttgccgtcggatcctccgagtcatcggcggatgtgtccacacgttctcctcgtccatgtgcatctattggcggcgctcccgaagactcatgaacactcccactcgccgctaatgctgcacgatcgtcccgatgattccgcttgcgctgatcaggtactggagcctcttcggccccaacgccttggtaagcatgtccgcgagctggtcctccgtcggcacgtagttgacgacgatgagacctcgggacacattctcgtcagcgttgcttgcgagagcgatcgcgccctggttgtcctcccatacttgggtagctcccactcgctcgtggcccatgtccttgagcatggcgcgggtccacagcacctcctgcgtgcacaggctcagcgccatgtactcggcctccgccgagctgagcgccaccgtgcgctggtacttcgacttgaaaaccaccggcgccccgctaatcatcaccatgatgcccgacaccgagcgtcggtcgtcgagattgctgccccagtcggcgtcggtgtacgccgtcacctcgaccttcttcgcgttcccattgtaggcgatgccgatgtctcgggtgctcttcaggtacctgagcccgcggatggcagccttccagtgccgctgcccggggttctcgaggaagcgcgacaactgggtcacgatgtacgccacatcaggtctggtgcacgttgtaatgtacagcaaacagccaatgagtcctcggtagggcttcgcctgcatttcctcacgttccttctgagtcatcggcgactgagtcttcgacaacttcatgcccgacccgcacgggttcaccaccaccttggcgtcctgctggttgaaccgcttcaccacatcatcaatgtatcgagtctgcttgatcatgagagtcttcgccgatgcgtcatggtcgatctccataccgagaatgaacttggcctcgcccaactccttcatcttaaacgcattcttgagcgccaccttgacttcctggatctcgctgttcgtcttggctgcgatgctcatatcgtccacgtataggcagacgtacacgaacctgcccttctcgcccttgacgtatacgcactggtcaccgccgcagctccgaaatccgatgcccacgaagactcggtggatggtcttatgccaggcatttgccgcctgcttcagaccatagatcgccttctgcagccgacacatcatgttcttcgcgttgatgattccgtggggtacctccatgtagacgcgctccaccagcccgctgttgagaaaggcggtgtccgcatccagctgctcggtgatgtacgcctcagccaccacaaccgacgacaccactcggatcgagttcatgttggccacgggcgagtacgtctcgaagaagtccacgccatacttctgcttaaaccctttcgccaccaggcgggccttatacgggatgactcggccgtgctcgtcgcgtttctttgcgaacacccagcgacaaccgatcggtcgagcactcggtgtccgacggaccagcgtccatgatccgttatccgcgtgtgccttgagctccgcattcattgccttcacccactccgacgactcgtcgctctgcatggcctgctgatacgtggtgggtgcgtcattggcatcgccgacgtctgcagcgtaggccagcaccgcctcagccaataggctgtcttcgtccaccctgggtcgctttggagacggtggccagaagtgatcatcgttgtccgagtcatcgggaccatcatcgttcgactcctcaccgtctgcggaaccatctccaagtagtagtaccggttctcgggcgcgccgggtccgttccggctcggggtggaagaccatgtcatcattcactaccggtctcgggagtcgtcggtacgttgtcagctcctgcatggatggctccgacgtctccacctcatgcatcacgtgtcctcgacggtctcttccactgattccatcggctcgtcggcggcaggtcgttgtatctcctcgggcagtgccgcatcctcggcatcttccgtcaactcaatgttcggcgagttctcgctgggcgccatgtcgtagatgacgttcacctcgcactcgtccagcttcaccgacctggacaccttcaccttgttcgactccaagtcgtacactcggtagccttttgagtcgtcggcgtacccaagaaacatacatttgaagcttttcggctccaacttggtgcgccgcgccttgtcgacatgagcgtaacgcatcgacccgaacactcgaagatgatccagccgaggctttgatttgaacgtcaactcgtacggagtcttggtcgggtgcatgctgttcgtcgaccggttgatcaggtagacagcagtgctgaccgcctctgcccaccatatcgaagccacgcccttgtagtgtagcatgcttcgggccttctccatgatcgtgcggttcatccgctccgccacgccgttctgctgggggctatacgggaccgtcttctgatgcataatcccattcacccggcagatctcagtcatcggcgcgttaacgaagtcagtgccgttgtccgagcgcaggcatttaatgcgctgcccccattggttctcgtacaccttcgtgaacgacttgaacttggtcacgacctcgctcttcttggtcaagaagtacaccacgacgtgtcgcgagtagtcgtcgacaaatgtgagcacatacctcgctccgtccttggacttcgtcttcataggacccatcacgtccgtataaactagtgcagcggtcgagtcgtcgccgacgtcgaccgcgacgggaaatgtgcgaccgtccgcttgcccttcatgtatcctccgcacagggtcttcgtctggtgttgagtcgtcgggaacccgtccgtcgcctcgcgggtctttgccatagcgtctccgttcaagtgtcccatacgagcgtgccatagctcccacttcccgtcgactcccgagtaatcggtgtaatacaccatgtcctgctggcagtccagcaagtacgccttgccgaccttcttccccgaggcgatcgccttcgtcttatcccagatgacgcacgacttccgctggaactcgacactcatgccgcgttcagccaacctcccaaccgagagtagtcgccggtcgagtccggggatgtggagcacctccaccatcttgatgcgcttgccgtcgatgcccgttaagcgcaccgacccttcccctgccacgcggaacttcttcccgtccgcgattgtcacatacatgtccgccggcgactcgttgtactcgaacaagtcatcgcggtgaggcgtcatgtgagccgtcgccccactatcgatcagccaacccgctgatggattctccgccacagcgaacaccgagtcttcggcggtgtctccatttgctttatgtggcccacttggtcacagttgaagcacttgccattgaagccaccgacctttcgtccgccgttgcgcttgcggccgaatgccatgccgcccttgccgaacttcccgttctggtccctacctccgaacgaggtagccttcaacgcgcgctccgtggtctccttcttctcctgccgctcgtactccttgagcagcttctccttcacctcgatgagggtcacgtccttcgagttctcgacgatggatgcgatcaactcgtactccgccggcaagctgctcagcaggatgacgagttgtcgggagtcatcgaggggctctccaagcgtctgaaggcccacgatgagctcgtcgaacgtgtccaggtgcttcgccatcgtcgcaccgtcctccatcttgaactcgtggagccgacgagtcatcgtgacccgattatgcatcgtcgtccggttgtagaactcgcgtagagtatttcaggcttggatagccgacgtcgccgaccgaatcttcgtgtggtgttccacagccacgccttgaccgatcagaccgagcgccttcatgtcgttgagcatcgaggcctccgtcatctctgtcgggtccttcaccacttggacgtgcgccagcagccccttcctcgcgagcgtcatacgcatcgcgaactcccagtgtaagtaattgtcgcttcccaggatgacttcggccttcgtgctggacgtcgtcatgtcggtcgtcggggagggcttgagcttgttgcggctgttaacctgttggtttgtagcttgtggttgagggggcaaattccgaagtgagattaaatgttatcgtctctcaaactactctctagtcttcccctcctgctttccttcttgttcgccttgtgctcgttggtgcctctcatcagacggattactcccggtatccgcttgaattgatctcagtatatatgggtctccctgaccagtcattggtgttcccagagcccggctgccgccggctctcctgttgccgtcggatcctccgactcatcggcggatgtgtccacacgttctcctcgtccatgtgcatctattggcggtgctcccgaagactcatgaacagtttcacaatgcgcggcagacatcacttttttacccactttttgtagccaaacatgactgtcagtaaagaacggaggatggtacgcggatcttgccttaattaccacttggaagctgctgcgtggtgctgatcatttgcactttgtgaaaaatccaagtctttaaaaaaataagagactgttgtttaaaagccttcaaaaagtacaaaatgctatgagcaagtaattaggtgatgttctattctcccaaccataatgatggtctggccgctttttagggtttccattttaggagcttggaagtacagcctacttttgcaacatacatacttagtacagcacgcgccccgaagcatttttacatgtattatacgatgtagatttcggattattggccacaaaaatttgagttgtacgaatattcgaaggtacttgtaggaggcagcaagaggaatgcttgcagtatgtaaaactaaactttccgtgtgagttttgttggcctgaacgtaaacacagatgcgagtgacgttcgtaaacaaacagcatcccatgtacatacccaactcaatgcacgctccagcaaccctaccaagacacaacttttagtacactaaatatgaacgcttcaatcacttggaattgcgttgttcagttctgcacacaatctcatcaatccctctccggcaagcaagactcaatgtgccttgtgatgcggggtcaatcctatatcgatggcactatttccagcagctacgagatcccaggaaacttacccaatcgaggccgtagttgcgaggccatttagcattccgctgtccacgcggtaattcgatacccgcttcaccacgccctatcctacctggtaggcacgagcgacaaatcccccttctgattgggttgctgtttggaaaatgcagtgtaagtataacaagatgctggacccgcgagtcgcgccatgagaaaacgttctccgaaggtcaaacggaagagcgcatgcaacaacgccatcaatctctaaaagggttggccttatattggttgcgtcgggtggcggctgtccacacgacaggacccaaaaggccaaaaaacacgacatgacatcgccggtaacgcggagttgccgtcgtgcaacgtcacagcgaggactcaggaacatttccccatttatcctgtcttctgcttcttcgatacctgctcctcctgctcatttggagctcgcccaaagacctcgttcagctgctgggacactcgaatgaaagtcgtgcgctttcaaagagcaataaaagcacccacgacaacgttagatcagtacaatgtggaggcattgctgttgcgctttgtcgtaccttgctgatttccttcagcttgctggctcccacgtaggtgcaggtcgagcgcaccccaccgaggatctccttgcaggttgaggcaacagcgccacggtacggcaccgtgacactcttgccctcggaggcgcggtactcggccacgccgccattgtgcttcttcatggcctcggacgagctcatgccgtagaacttcttgaacagctggccgttgatctcgatcttgtcgccgccgctctcgtcgtggccggcgagcatgcctccgagcatgacaaagtccgctccagcgccaaaggccttggccacgtctccggggcacgtgcagcccccatcagagatgacgtgtccgttgaggccgtgagcagcgtcagcgcactcgagcaccgccgagagctgcgggtagcccacgcctgtctgcttgcgggtggtgcacacggagcccgggccaatgccgaccttgatgatgtcggctccggagagcagcagctcctccgccatctcgcccgtcacgacgttgccggcgatgatcgtgtgctccgggaaggcggcgcgcacgttgcgcacggcctgcacgaagaactccgagtagccgttggccacgtccaggcagatgaaacggatgtccgggtggctcttgagcacggccgtgatgcgctccaggtcggcggcgctcgagccggcgctcacggccacggtggggagcacgtccgggtgcttagccgcgaaggccgcccagtccgcgggcgtgtagtgcttgtgcacgcacgtgatgaactggaacttggccagctccacggccatctcgaaggtgccgacggtgtccatgttggcggcgatcacgggctgcgcaaggcacgaggtgggttaggccgagggtagagtgatagaagggtagagtcatagaggggggacgcaccacgccggaccacgtgcgcttcgagttgcggaagcggaactcgcgctgcacgtccacctgcgagcggctcttgagcgtgctgcgcttggggcggatgagcacgtccttgaagtccaggcggacctcggtctcgatgcgcggcatctccttcttcctccttccttgtcttcgtccggcggcggcggcggcttgcgtccgaggcagcaaattgcggaatggatgagggcagcttttggctcggctgacgtggcggcggcaaaggtgcaacatcgcagagttcgcattcagtcttcaaggactgaagtagcattgaagtaacacgacaggaaccttcgtaaatgagtgtttcggacttagtggggaggtattaataagatgctggaatttgtatgcggtacctgccagactcgaggcaagcgtctgtagcgttacttttgtgttgaccactcgcccacttcaacgtctgacgctttgtcgcatgatcagccgggtgcggctccaccgacggacgcacgcagttacatgtacatgtacatgcatcatcggcgaatagaatattcggaaggggccacgcttacccaaccttaccccaacttcttgtatgaggaaccaagtgcagcatcaacgctaagttacgacaggcaaacgtatttttttcgcgtgactgccgtccgaagcggattgtgtattcgacacctccgccccaatgttttaaaagcagaaggcaccagcgctaaagtcgcttgcaacgcttggactgcacacttactttccgttttgcattccatttttcacacaataccttgattgagtttaccatggctcgaaggaacgaatgaagatgcggaaaatagagaaatggaccaagaacatgaaattgccgaagaccagcgcgagataccggtcaagtgcacaataaataacatcggaagaaagtcctgagcttccttgtgtaaagcatggaattacggtttatggtcaaactagagagagagagagagagagagagattaccggggtacgtattgttaaatgtgtcctgtgattcctagcgtcatgcgcaatggtccatgtagttgatggatataacgttcaggtggacgccgcagccatgaccaaactcgtacagtgagtatgcaagcgtttaagggcccgttgtatcacaaccgtctactactacatgtacttgggtggcactttacagtcacagtatctgtttcggtgttgctactcctctaatgtggaatgccagcataaacaaaatatccaaacaaaatatgaggactaaacactaaatagtttccagggtctccaacccgttgctggcgagttgagcgtccgctttactcagcgtctgcctcaggctcttgcgcccctacatgaaaatatgcatccctccaatgggctatgtcgccgtccaaaagacgagatacatccgcccatggggaaacctggtttggtcggtctgaatgaaaaacttgccggctcctgcgatcatccatggcgatattcgccaatctatccgcagccttgttgaatgccctcaagtggtggttccacgtgcggacatgtactcgatctgctatgcccctgcattgagcatagatattgtgtagatgcggagccctcggaggccgccgccgtctcatttgtgccaggaccattgcgctgtcaccaatcacatggatccctgtcatcttccgcgctagggcatggctcaacccagcttggagcgcgcgataatccgctatgtggttggtcgttcgtcgtgaggctagcgatatgctagccatccattccactcttgccgttatggcaccggcggggagactaactaacacgcagccagacccaccaggacctggatttccccgtgatccaccgtcaaagaacagaatcaactgtggccgggatagcgccaccagcggggagggctggttaactagatcttgaccgagcagagccgaagacaccaacttcgcggcttcccttcggccaccagcagatgtcagttgatgcatcatgacgcggacattgatatatgcttgccagagccgtccagctaatagtgctgccgcatgctgtgcagatgagttacgagctacgtcccagtacgctgaccagcgacgccagatagcttgtaaggtaaccacgatacctagggaccaagccgtagcaagaataggttggacacattgctgaattttgtctctttcctctcgtggtgtggcgctgaatactctatcaaaaatgggccacaagtcgcagggagctttaggccaaatacatttttcgggcgaaagtccgcatctgtaaaccccaatcgctcccaattttgatagaagactagccacagcgatcttgctccaggacacgtccaaaacatgtgagcgactcccaagtctgaagtagcacactcctccatagggcacccagggcaccgattgacggggtcgtacctggagaaagctctttgtttgatccggaaaagaagttgttccccccaaggagatacccccacaattttcctaatgtcagcccacgagtatgtttgaagtgcacgtccaatttcctcagagtctgagacccatgtcgcttgtcggttggtagtcccgcgtgccccacgtctgcgaggcgcagtccgagccgcatctttatagtggcggcgtctcagcttcttgcgggcacgtccagcccgcacacagacaagtcggctcagtttcggatgggggtaaactgcaaagatcttcaccacgtgtccggcgtaagcggcaagtgcctgtaccaactcgtgctctgagtttacaaagcaggacgaagtaggacccaccgttgacgtcctgattaacacctcaatctggccaccatggttgaaaacttgcgcagtgatagggtgatcagccggtgttgcagtaattttgagatccatactcccttttttcagcatgtcggggaaaaataaaagtagtaaaaccagtaatccacggatattggcgcgaatgtcgtcacagtagttgtggagaatgccaactccggtgcataatacatcccagcgcagaatattcctaagtaaccttgctctgcaagccgatgccgaagtcagccagtcggttccaccaattctgagctcacgctgtagccgtgctagatagctgagataggtgtattccatccactcaattctaaaatcccctaatatggtttgtagatattgacgtagcggtgccattccgtcgtaaatgtctctgtagtgggtttcgaatgaacacagtcacgagggaagctggcgcttcctttgaactccttgcttgtttggttgttctcaagttctagagtgaggaggttagatagacctcagatacgcctacaagctctactaggatacctgctctaatctaaccacctcgtggtcttatcctacgccagcttggctctgatcatcctcgatcgacagcccagtgcgtggtcaggtcgtgaagaccattgccccactaccaagacttgaccacgccgttgaaagtggtgatcaaatattggcttcacaggaatgttgcttgaatgtacccatgtacccgaatttcggtacaccttaccagtggcaactttagcacttcaacttgaagttttaaagttgctcgactgctgaaacaaactccaagttgctcttaccagaagcatactgcttcaccatcacgggaatgtccttgtacaaagaactgagagactcccatgagtcctcaattggttccagacctttccaccctaccagaacctcgaaacatctcttggccgagttccatcggtgatccttgagctccgcaacagtaaggacaataccttgagcagccacgtgctcccgtatttcctctgtcacctcaaacgattcatccgcatagaacttgagacgcgaagagtgcacgtctgcctccgcaccagtcactaaatgctggacacggaaagagtgttcgtctgaaccaaccacttggtacgggcctatccacgtgactaaaagcttgtcgttgtgtttctggtctacacgagatctcaaaacgtaatctccaacatcgaaatttggtttccttgcccctttttgcatcgcctgattacgcctggtttgatccgacctcgctatctccactttcctgtgcatctcctgcacacacactcgtattttgtcaaggttcttctgaatctgctctgagttgatgccaatctcgacaaaagtctcagtgtctttctcaaaagtgaaatctagaggagagactgcaggtagaacacaaaacaattccacgggagccttgtttcccaaagaaggtaccggtgtgtgattcaaatttgactgcacctccgagataaaatatggccaatctcgaatatccactttgctttcgagacaaagcacacgcaaaacttgaataatatctcggttcaatctctctatagttccattagtccacgggctgtaagccacggtgaaccgttgctggcaaccaagtcgcttcgccacttcaatcatcagttgattcttaaagtgacacccttggtcactaatccaaacttgggggctccaaatctactgtgccaatcgagaatggcctcagcagtcactactgcactcggtgttgcacatggtaccaactcacaaaaatgagtcgcatcgttcttaagtaccaatagatacttgtaggtaccgtaggaatctcctagatgcaaataatcccagtgcagtgctccatttcgatccttacaacggaaggtgttagcccatggtctggttacaatcttccccccttttacatgctgagtcagcaagaaaggttttgaccatggctgagagattccgtacgtaaaatcgtcgattcatgacagccattaaggcttcgcgacctctgtggccctgcacgccacagtgagcgaccacaagtagccgctgcagtagggcaggctcattgtctgggatccaaatgcaaccatccctgcacagaagtccgttatcaccacgcttcaaacgtttaggcaggctcacaatgtaccgctgttgagcctcctgcagttcttgcaccgtaggccacacgaaagggccgtcactaaatggtcgaatacgttggcggcgtcgattttggtctttaggctcgttgtcttcacactgccgtctcaacgtcacacgcttcaccgccacatttggcattccactcgcacaggcccaccgagaaaccatgtcggcccaaacgttgctggttccgtcgatatgctcgatactgtagcggtattccattagtttcatggcccacctcagaagtttcccgcgtacgtgctttctaacttctttgccaggtgcgaatacatgtatcaggttgcggtggtcgcagtacatgcgaaagccgccaggacgcagcaacaggtaactgagcttatcgcatgccatgatgattgggtatgactgcttttcgatgatactccagtttctctgagcaccagtgaacgtaccaccgagacaaatcaatagttcgtgctgctggtcctgaatctcagcaccttgtttccactcaggcacttgcgagacgattacagaccagcccacatccgaggcatcagccaggagaatcatttccgcatccggcttcgggaacgtgaggctagctgactcagctagagctcgcttcatctggtcgtacgcctcgcgctctgacgaggtaagtgcgactgggatgcccgaagctgcacgcttagtacgtctcgaggctttagtcatcgcttgatctagtgcatcttgcaaagggcgagcgagtcgtgcatagtcaatgatactgtcgcgcatccagttcgtagaacacaggaattgttgcagctcgcctgcattcgttggatacggcatacttcgcaaagcagcaattctctctgggtcatgtttcactccttccccattgattatcttaccacaccatgttacttcttgcttgtacaggcaggacttggcggcactcagcttaaaaccgaactttgccgtgagctcaagcagctcctgcagtttgtccaggtaggtgtcaacatcgggggcgtacagcaagagatcgtcaatccagactaataaatgcttgtacaacagtgcggcgtagcaacgctccatggtggactggaagtacagtgctgcatctgcgctgccttgaggtacgcgtcgtggagtgtagatcttcctgtgcgtcatgtatgataggagctcttgacactccttggccaaaggtagctgccaataaccttttatgaaatcgaaaaggccaaagtgtctgctgccccgtacattttccaagtctacatgcaggttgggcatcactcctgccatgggctccgtttgcgcgttcattggtttgtaatccacagtctgccggaactcaccacctccacgtttgcgcaaaggcaatgcggcacaagcccaacggctcgttgggttttcatatacccatccaagtttgacaagcatgtcgttgaacgactccagaaacgcttgatactctggtgcgtacttccgtgctttagctttgaacggcctgcagcctgctttcatgtgcacgcgcactggttctacgtccgcaggagggtcgtcaccgagtaccagcctccaaacgtcgtaagcatagacgatggtacgaaggcgttcaatcttgctcacgggaaatccttcctgcactgctcgttcaatcatcaactcgacagctttacgaatatcatcatccgtattgctaccattcgccacatcaggttcctcatcgtcatcctctccatcatctctacttggcgctgccagaagctccaattgtctcccaacatcaataccaagcatcttcaacacatcgttcccaagcaaaaactcttcatcatcattctcgaggattaaacacgtcaccggcttgctgatactcaccgggcctgcggctgtcatgagcgacaagtgcagtttcgtcatttgatgtgcccacgtcttctttcctccagctaatttgcactcgacgggattttgcaatttcatcacttcacactgcatagcatgctcaccaatttcttgtagggtcttcgaactgacaatcgatgtatcagcaccagaatctggacaatactccacatcaataacgccattgacacgaaaaacacggggtttcccagccccactgggtaggcactccctaattcgcatgagcattacggtgccccccaggtttcggcttgcgccccgccatggatttgccttcgttcttgttgggggcagtcggcccgtttgtgcttgccgccacaggcccaacaaccccatgtcgatcttgtcgcactctgctcggaaccctcctgaaatatcggccgagacgttggtttagtgtagtttctctgcgttgccctggcgtctgacaccatccgagccttctttacaggtcgggccgacgccggtcgagacgactctgcatcagaaggtcttctcttgtttcgtttcaacgccaagtcttctcgatcaacctccaaagctttctcgctcacgatcttgaagagcacggagacgttcgacttggctagaggtaggcgaaaatcgatttcatttttcaccctcaccttcagttcactgggcaggcaattcaacaggatcttacacttcttcttgataccttcctcgtccgagaaaagcgcagtcaaaccattgttttttacgatcgtgttgcacagatgaaagtagtccatcactcgggcgtcaacgtcggtcttcaagttcgacatcacaagttgcccttggaagagctgatcaatgttcggaagagcgttgttcttgaagctctgcaccgttttcattatccactcccaaatgaactcatctgtcaggtcctctttctccgtttcccacttggtctcgcacagcgtctccaagaaactgtcatcgaaagagttccgcaccgatctcatcacagacttcaaatcttcaccagacgactcacagcgcgcccgcatgatctcctcgtactccagtcggaggtcaacccagcgggtgagcgcctcatgcgagatgtcctccaccttgggcgctgctgaaacagcgaaaatgggatgcgccacagttgggatctcgatgtcctggtttgcggaaagaaaggccaaacctcctcctagcccaacgggggtggagtcggtattgggttcactaggttcgctcactcttgctttccgagcaggtttcttgcccttgcctctgttcgacttggcttggcctgctcgtgccgtgggggccacaaccgtctttctcggtcgtagcatccttcccgagctagccgctggcggagccacattgtcagccgcagcggtggtagcattcgtcgacgtagttgtgttgtccatgtcgattccttcgacactaaagttaactttgtagtgggtttcgaatgaacacagtcacgagggaagctgacgcttcctttgaactccttgcttgtttggttgttctcaagttctagagtgaggaggttagatagacctcagatacgcctacaagctctactaggatacctgctctaatctaaccacctcgtggtcttatcctacgccagcttggctctgatcatcctcgatcgacagcccagtgcgtggtcaggtcgtgccccactacagtctcgacaattaattgtagcggcctggtctaccgctttcttcaacgtctggtgtcggcgcattattgcatggtcagcaatagcttcgtgcacgctgccttggaagccacgacagaaggcaccgcagtggtttatatacagtgagtctacagcgagacacgtttgttatctcgttctggggcatatatgtagcatcgccattaatacttgtctgcacaattcgtcacttcgtggagctcgttcgtacagtggtccagcaaggtataagaatcacgacgcacaataaagcccgtggcacgcatatgcgcaagtcctttgtagcagagcaagtgtcacctaaagagatcgctaaaacgtgcttcaatttttttagggaatggcagatactgcaggttttgttggaggaacgcaccgatcggtaccaatgttgaaaggagcactaaaagagactgtattactgcctcacccgagaggctggacggagttaacctgctggcgcctgcaaataagtgcaggagggtgaagcgacactacttcagtgctcggattccgagcaccgagcctcggaaaaatatgatagtaaacaaaataaagataccctcatcagcagctataaccagaagcgtcttaaggaccatccccagctttctcgcctcctcagaatgtttggagacagccgaacgaaactgctgaatgtcgttatcagtgatcttgacgttcgaccacagttgggttgctgaaaatcttgcgacttcaggttcatcgccagtttctttagtgattcagatcattcgctagttttgaagaagttcggatttgcgatcccaatttctagcttttcacgaccgagttggtgtccagcgctgcaactatgtcggcattcttgcgcgtgcagccgagcttgttgggtagaccagtgttcttttcaaaagcgccattgacttccgatacaaatgcctcgttcctctatcgcatcagttttgccgaagctgcgccatttccagcagcaacgatggggttatcctcgtcggcaagtgctggatttggctctgcaggggacgtcaacctggtcctcagctgccgcgacgcaatttgctctaccgacgagggtaaatagtagtaggattatgaaattagctgcgtgcatgagtgtaacttgaatgtgcgcgacagatcaacagatccgtagcggaatgaaccagatccgaagtgaaggccgttccggcagtaaatgtacactagtgttgtgtcctgtgctactgtacatgtattaaaacgttgtagtcttgtcgtcaaactatgatacaaataacgcttttgaagcaccatagacacaataaaatatgtggggcatcagctgagaggtgtttgcgtcagataaacggttttttggtatcctcggtgtgccctacatcctactgcaatataggaaaatgtgtaccgtattttaaagattaagaattctaaatatatgtatacacatccaaaatctagaccagtctaaatctgtaatgaatctaaataaaaaaatctgtggatcaaattcgcacgcaatgctgcggctcacagcgcagcgagcgtggcgcctcgcgcgaccgctaagcagcgcccgccaacaccttcatacaaggcaagccgcgcgatgtcctgagctttcgaagcttcaactcgacgctgcgcggagaagagaagggttcggatggtgctctgtataacaccaaggatggcgccaaaaatgatgtcgatgtttacgagggaagggagaagaagattctggctgagctgcggacatacaagaaactgaatggggatctcgtcatgcccatttcgtttgcagtccccactggagattagcgttagccgttgctgacgtgggggtacaatctaggggctgctgtcatcaaacttcggggcaggctcaagaacaattcggcactttccactcagatgaaggaggagctagaaacgatggacttcgtggggaacccaagccaatacaaatgggatcacctcgttctaccggcgctgcagaggttccatgaagtgcacaagcacgcagatgtcccgcgagaatttgtcgtcccaaccgatgacgaaacctggccaagaattgcttggggttatcgactgggaagtatggccaaccacattcgcctaaagacaacgtacagcgctcaagcggcaatgtccaaggacgagctggagaggattgacttctgcaacggcaagtccatcgctgaacgtgactgggcggagatgatactgccgtcgttggatgtgtatcggcgagagtttggcgatggcatcattccatcggtgtttgctgttccagcatctccaccatggtcagagaaggcgtggaaatagccactaggaagagctgtcgaagataaccgacaagggaaaagcttcgtggagcaaacaactcgagataggcccgtacttgatgccatcggctttgcgtggaaccgaagtgacgcggtgtggaatgaggtcattattccatcccttgcaacgcatgtgggcctcttcaagaatggccgggcccttaagagatttgttgttccgtctgaagctccttggcctgagagagcgtggggggaaatgctgggtgggatgctctctggcctgcgttccaagggggcatatttcggacagtacgggcgtgacattgaaagctgagacgagctcgaattgacggtgagtctcaagttgtcttcacgagcgtggaaagagcgcgtggtaccgttactgagcttgtacagggggcttcatggagaagaggaagttccacacgatttcgtgattccgtcagatgcgccgtgggaggaagcattttggggtgttcgactaggtctcatcgtggctcgcaacccgcagcacggaaaataaggtggcctaggtggtctgcgaaatgaccaacgcccatttactgagccaccaacttcttgaaaactttgttatcaacggctgtcagcatggtgaagagttctattgcctctcggacgcgtcgctggtcttcttcattcgctgggatcattacttcgaacgttgtacggaggcttctggtctcccatcgattgatacctttgatcttggtggagagccactcgaccttcacgaacacgttgctgtccgcgcagcgaatacagggcgtatagcgcatgcgcacgttgttagtggcgagcacttggccccatggtcgaaggaacccccactgtgccatcgtcgcgatccgtcgtgaaccaaccgctggcttttttggccagcagagttagtcagccttatcgtgaggtgaagtagctcccgcgacattcgagtacattcgttcaagcacgtcagcaaaaaatcaaagtcgttcggggcctccgagtatctcaagtccattttccttagcctccagttgcgtaccgcctcactggaagtatttgcggtcacgttgattcggttgaggcaaatacttcgcaggtttgcgcaagcgcctgctaatgcgtttaaatcaacggtaaccggttggtaaggttccaacaccgcgatcgataaggagcgaatgttacctccgattggcttcaatagattcgtcaaggccgcaccactttggcaaattgcaatagccagtttcaccgactgaaggcgccttgatttttcagaaaacgcacgcgttggcatagctacgcgatcagggacgaatctatttgtcggatctgcgagctccaacgcccaaactccatgatcgggaacgacgacattgacctcgttcatcagcgcgaaggggccggaaagagcgcgacagcggcaatcgtggagtagagtgaaggtggcgttatcggcatcgccccatccgctgatcgcagcgtagctccagctcgaacattgacgtagccatattgtggcgagttcagcgtacttaacaccggggcaggataacggttctgtagcgcagcctccaacagagccacgccgcgttgccccagatccacgcccgtaatttccagcttttagatcgagttgctcgataaagtatattcgagccaaccccagtagctgcgatgcatacgttggacgccgggatgatcttgattaacccaccttccgattgacaatgttttcagtcttggtaacccagcactcgcgctacaaactccagtcatcctcacatcaaacggacaattaaacagcactttcagctcacgacagctatcatttttttcggaacgaaaaactgtggcgccctcgtggaggcgcgcagattggtttgcgacgcagtaaaaccgctagtaggtacccaaaatctagcatcgcttcaaattcaatttgccgaccagcactccccaaatttagcttgtggtacaccaagcccgagcgaataagcgctgcaagaacctgctccacatttaaccccttcaaaccggtagctgtttaacccttctagccccagctaatattctgtatcctaccgaataagcatttgacttgattaaaatatacttcaaaacctgtcaaagatttgctgctacaagccctttcgcatcttgcggtcaagatctgggcgcatcgtgcacaaaacagctacgaaagtgaacaaaacatgcacaatgtatccaccatatgccagaatggcgatcttctattggttgtggcgagcgtagagcacgctcaatacttgttacatgtcaataccttgcaagtttgctaaggcaacatagttcggccccaaccaccaatcttcagcgcgccgcaataaacgcggaggaagaaatcgcccagttcctaactgacgtagtgaggaggaactgggcgaattcttccttggactagccattcgggcagcatagggctcctttagcccacatcatcagctcggtactccggcttcgttggcaccatcagaaagtttgcatgttcagtagcccataacggcacgtactacaacgaacccgcttctatcaacaagacaatagacaacactgatgtcaacgtctacttcttcctttacatccacacagtcttcaatgtacacgcccgccgtgggtcaacttcaccatgttggcactctcccctgctctatagcctccgccgctgccgctccatccctgccgctccatctctgccgcttccatccgtaacctccgccgaacactctgtcacttgttctgtagcctccagcgtggacacatctgaagtagggcttcttctgtagcatccctcgtagcatctgtcccttcttctgtagcatccggcgtagccacatcaagcgatgcgtttcttctgtagactacagcgtagccactgcatctggggcacttcgccggtagactcgatcgcagccagcttcctaggcactaccgaagttgtgcgctgacgccgcaaccatcaatatcgctggatcaacttgcttgccggtcgggccacaggcgagagcacataccgagatattagtcggatcaccaggcctggtacacaacaccataacgtcgtataagtatacttctagaccagtgttagtacaaagtacaagcttttgattaccttcgccgcgcgttggggctcactcaatcgtcttcggaccatgggcaccatggtgcacaggtccttggccatccttgtcaacttgggtgtggagaagtgctgaataagaattgttctccgagaatggcggcagggccgatcgactggaggcgtgggagatcggcgatcgagagacaggcaacaaggatctccggatcagaaggagtttttcgggagatctcaggtggcccgatgacgccggcgcgtaaggcaggacatgtggcaagccggattgtgggtgatcgtgcccgaaccgcggcgtgattcgtggccgacccaagtccagatcgacgacagaacccgcggatctgagatggccgaggacagaaggtgatagatcggcggcgcatggcaaccggcacaagtcatcgatcgggagtggatcgccgatcgcgatcgatcgcggatcgccgatcggggtcgatcgtggatcgggagccgatcgtgggtcgccgatcggggccgatcggggtcgatcgccgatcgaccaggatgggacgcacatggaggacgaagtcgggacaagaatccagtaatcgtgtggttgtaggagggtaagcaagatggtagcattagggagaaaccagctaaacataaatgagagcagaatttgcaccgaagaccacaagtcccatcaagtcaccaagtcccaggaactacattggcctcggcagcgtcgacactttgggtagtgaactagcggtacggttaagactggattaatacattggccagcttgacctactctagtgatctatctcttgtgtgcaagtcctcgatcgaccgggtattggtgcttggccggcgatcgtttctcctctcgatcaacctcgatcccgctataggaagcggcaagcaactcaggaaaggaaggaacacacccggaaaggcaaccacaggccttggatcaactccaggccgaccgatcgcagcgaacaaccctcgatcggagcgtatactcggacgcagagcgaagactaccgcgctgctccacaaactatccccgcgtcacgctaagacactcgatcttcaccaagtgctgcatcttcgcagccccgagagagcagatccagcccgccgacgggtacacaaggtgagaacaagttcagccgatcacggatcgttgggggaccccctccgttagtcggtgtctgggcgctggtgggaagcttcatcaggccttaaccagatgttggccgatcccgctacaccacatgggcgcgttcgacaggactgcatagagctcgcatcgcgacgacttcaacagcaaagctttcgttccagaataaagggaagcacgggtggttgacacgcggcactttgaggcttccacccgaattttcaaacctgttgggcgtttatactcgtccatctattgccgcagaaaaatccccgtctatcttcccatcgccaatctaacaggaagatgtccacaatagaggctatatatgcgaagtttgaaagagaagcttagtttgctggatattatgtcctgtgacaatgcttattctgtaggatacagaatacggggttagaggggttaagtacgtaagttgatatgaacagcgtatgacgtgcatacagtacatgaagtacacggagttgtcgaaacgagtgttggctaattgattcaaaggtagctactctcttaaaatctcgacttaataggcaacgtgtggggttttcccttcgtggttctgcgagttgtagaggaaggtgccgtcggacaactcagtgacgacgcaaggttcactaactggggggagtcgtttgggttccagtggggctcaggagaatattcgccagggtttcaaaacgcgatggagaggtcaaagactatggggctggaagggaggcgctacctgcacgcgtcggcaatgttggaagtcttcctacagggccatcgagacgaatggaagacagcatgttgcctttacaccaaaatataacaggattatatcgaccacggaagaattttcgcaccatttcggaagctttttcggtttcgaggcatcgccagcagcccacttgtgcgctgtgagtgacgctgatcaactgattggggcttggagccaatgaccgcctcagctactcgatgaatcagtcgtcaacaacgtcgaacaaatgggctcaacgttcttggatctcagcgttatgcaagtttaaccccttcaaaccgaaggaattttccccatgtctatgctgtacatacagcgtattaacatatagaaaattgtatacgatagggaagggggaggtaagggcgctgtgctcatcagggcctggttacatctaaagatgtatatacgacggagtaaaaccacttctaacccgtatatatacagctatgcacagtgctgaagccgcgcgacctggtgtgtgtagcatattggtaagtttatgcagggcacacacggactatgttctctcaagcgttagattcgtaggaaataatatctctgagtatcgggattccggtagcacagacaagtcgagattgccgctatactatattcaagttgtcagatatgcaatcaaatgatgacaatgtgattattggccagtggatgatcgtcatccctgtctctgcttgacgcatgctatcggtaatcaaaagcggcgtgagcaactagccgttggcagaccgattgctcattagatcacaagcataacacgaacaacatgacatataccaaacatgcattcacacgaagaacaacccaacctactcgctgttttcgctgacctcgctgctaacactgctgacacagcggcgcttagcgggcgacttccccggagagcttgtggctttcggtgcgcgcacacgaatcttgcccttcaggtcctgcgggataaccttgccgttgttgtactccttgtgccagacgtcccaacagctcagcatcttgcttcctaccgtccacttttgcttgacgcacaggtaaatcggcccagggaagtcgcatccatcgcagaagtaggtggaggtggcgccaggcttgccacttggcgtcttcagcgtacaaacctggcagttcttctgcaccctttttcgctgccccgagtggtcgcgccattcgtcactctgtttagcaatatgactgccagtgtccgcttgacgttcctccgcctctacatcaacggaaacattttcatctgtatatacgtgttagtcgtaatgcacatacagcatagccaccacagcttatacagcataatcaactcacctgattgaaatgcgttttcttcgtaaatatcctccggcttcagcgcaataagctgcagatgcaacttgcacatgaactgcacgtgggtcatcgcattgatcttcttcttcttgcagtaggctcggtgcacgatgaacgcgttggtgatcgccagatccacaagccccaaaagttaggaccggtagtactttcgataggtgatgcagcgctgcacagagtacgtttgcaggtggagttgatcgtgcccatcaactccgcccatgaagcgatgatagtctttgatgaccttggggcacgcaatctcgttctgctcaccagtcttctcgcggcacacaacacgatccaaggcgacctttccacccatcgacaggaaatgaataggtttgctgtcccaccagcaaattgcagccatattcttcacatgctttgagcgcgcgaatgtcaacgtgccgcgggggggggggggtctttgggcctcttcttcttctttgtcaccactgacttgcaaaatccacggcgattcgtcatgatggtgccaatcgtgaagaaccccatcagcagaagctgcaccaccaacacgatcgacgtgtaaaatcgatcaaccaccacgagccgcatgtacttgccaggcgtgatgtcgccgaacacagcacgcaagttgcgcacaactgccgccggtcctgacttcatgtccactgctcccgactggtaccaagctattcatgctttgctgcgctcgctccgcttactgcattcggtacgattgctgtttccgcttatactgtattgtaatggttgccttattctgtatatgcggataacgtatgctatatatacacgctatgcttgcgtnnnnnnnnnnnnnnnnnnnnnnnnnnnnnnnnnnnnnnnnnnnnnnnnnnnnnnnnnnnnnnnnnnnnnnnnnnnnnnnnnnnnnnnnnnnnnnnnnnnnctgctgacacagcggcgcttagcgggcgacttccccggagagcttgtggctttcggtgcgcgcacacgaatcttgcccttcaggtcctgcgggataaccttgccgttgttgtactccttgtgccagacgtcccaacagctcagcatcttgcttcctaccgtccacttttgcttgacgcacaggtaaatcggcccagggaagtcgcatccatcgcagaagtaggtggaggtggcgccaggcttgccacttggcgtcttcagcgtacaaacctggcagttcttctgcaccctttttcgctgccccgagtggtcgcgccattcgtcactctgtttagcaatatgactgccagtgtccgcttgacgttcctccgcctctacatcaacggaaacattttcatctgtatatacgtgttagtcgtaatgcacatacagcatagccaccacagcttatacagcataatcaactcacctgattgaaatgcgttttcttcgtaaatatcctccggcttcagcgcaataagctgcagatgcaacttgcacatgaactgcacgtgggtcatcgcattgatcttcttcttcttgcagtaggctcggtgcacgatgaacgcgttggtgatcgccagatccacaagccccaaaagttaggaccggtagtactttcgataggtgatgcagcgctgcacagagtacgtttgcaggcggagttgatcgtgcccatcaactccgcccatgaagcgatgatagtctttgatgaccttggggcacgcaatctcgttctgctcaccagtcttctcgcggcacacaacacgatccaaggcgacctttccacccatcgacaggaaatgaataggtttgctgtcccaccagcaaattgcagccatattcttcacatgctttgagcgcgcgaatgtcaacgtgccgcgggggggggggggtctttgggcctcttcttcttctttgtcaccactgacttgcaaaatccacggcgattcgtcatgatggtgccaatcgtgaagaaccccatcagcagaagctgcaccaccaacacgatcgacgtgtaaaatcgatcaaccaccacgagccgcatgtacttgccaggcgtgatgtcgccgaacacagcacgcaagttgcgcacaactgccgccggtcctgacttcatgtccactgctcccgactggtaccaagctattcatgctttgctgcgctcgctccgcttactgcattcggtacgattgctgtttccgcttatactgtattgtaatggttgccttattctgtatatgcggataacgtatgctatatatacacgctatgctttgcgtttagttttgaagtgtactgcggccaaaagcagcacatcgcaggcttagctttcatatacatccgtgtccaattgtacgatgaccttcgacggaagcatcgctttgtcgaaggagagctcagcgggagggatgaacgccgccgtgaggaagagctcagacaagcgtttgagccaccgcaaaacgagttccggtcgagggcggagttcctcgacctgcagcagggcaagcatgatgtccatgcttacgctcaggagcacggtacttggtctcgaacatcgtgaccaatccgatcgacgaggcgaccaaggtcgtcacgttcatgaaggggctgagagatgggcctgtgaagacctatctcttccgtgagtacccgagtactctcgaagcagcaattactcttgcaatgcaggaggagtttagcctgcggcaggctaagctgcatgcacatgttccgaggccacagccacgcccggtagtgcggacgggaggcccagaacccatggacctctcgagtgctgcaactgccggaccccagcagttgcagggaaacaatgtgcgatgctaccgatgcggtagaatcggtcactttgctcgggagtgcacggcccccgtgcaccagcagggtggctatcgcgacggtgccgggcaccgtcgcaaccaaacaaaaaacgctggacgccagtaggagcgggacgccctactggtaatgcagttccgcgtgtcgaccttggacacgcgacactgaggactgcagcccccagtgaggttcattctcactgcaagaaccaagatgacaagcctgaccttgtcatcctgaatgtgaactcgatgagagcaagcggctctctccgtgctttggtagattctggcgcgtcgaagaactttgttcgactgcgaagtctatcaaggcttgacttcgaggaggtaaagatacctcgaagtatgttggaagtacgactggcaacgggcgccgtcgtgaagaccgagaagcgcatggtacgcgtgtacttcacgtatgaagatcaagagtttgtcgagacctttatcgtcctggatctggacgataagtttgacattgtattgggcatgccgtggcttgcacggcatgatccggtcatcgattgggagaagcgcactctcgtgcgcttcggtcgcgacagcagaacagtgagcgatggccctgttgccgctacacacgcaccaacaggtgcgcgcgactccccactcgagacagcgcctaatgccgctgtcccggagcgccctgggcgcgcgagagcacacgcgcaagagcagtaagcgtcggcgtcgccgccgacggctaaaggagaaaatgtgttgatctcggagatcgacgcccgcgtttcagcgaatcaggtagagtctccgacctcaagaggtacggatgacgcaggcgagtcacacgcctcagccgtggaggctgacgcgattctgattggatcagttttggccaataataagagccaaggtaacgaaacaccgtcgactccgggagtcgatggctggggtgaatttgattcgtcggctcggggagccgacgcatcctccgtaatgggggtctccgccaatggttggcgtcgaggtgaagacggcgtgtcggctccgggagccgacgctgcagacggtgcggacggttgcaaacgttccgcaccggaaaaacttgcatgctgtcgtgcagccgggggctgctcgacgaagcgccgggcgaccaagccgggcttgaagtcgctcgcccgcgggatgaacccgccggcggtactgaagaagaacacccgtccacggctgggcctggacgaggtcaagagtcatgcggagccgggctccgcaggacaagaagacggcgcatgcgaaggtcgctgcgcaggtctcggcctggggtcgagacgctacaagaaatgtctgccgggcagacggaggctgagaagccggacgtcgagacgttgaacgtcttcacgcgtacctgtgccgggttccggtacagggagatgactctcgcgaaccctctgacgcaagcgtcggagttgacttcgcttccagtcatgagctggaaacgcttcgcgcgtgacttgcacgatggacgcatcgaggaaatatgcattctctcggacaccgagagaacgaagagcgagaatgaagaactgaggcagttcttcatggagagcaccactgagagcgaggacacctcagtgcgaagacgaagaaggagcgctttgaagagcagagctgggactcgttgaaaacgagtccctactacgagatcttacgggagtacgcggacgtacttccggaagagattcctgcggagcttccgcaggacaagggaatccagcacgagattgatctcgtgccggggacgaagtactgtgtcacgcgacagtggccactgccgcgagagcaggtcaaggcgatcgacgacttctttgagagtcgtcgcaaagctggacaagtgcgggaatcgaaatccccgcacagtgctccgacgttctgtgtcaagaagccacagggtggttggcgcatcgttcatgcgtacaacaagctgaacgatgcgacgataccggcgcagacaccgataccgcgaaaagatgtcatcatcgattcgatggccatgagcactatctacagtgctcttgatctgcgcgatggattctatcagatcctcatgcgtgagagcgatatccctctcacggttgtgagcacgccgagcggcatgctctgggagtggctagtgatgccgtatggtctgaagaacgcccctgcgaccttcaacaggtgcgtgacgcacttgttgcgctcggtgcgcgacttcgcaccgagctacttcgacgatgtgttcgtccacagccgagctgcggacgggatgagcgacgttgagatgcacaaggtgcatctccggaagctgcttgcgctcatgcgcaagcacaagctctatgccaacctgaagaaatgcatcttaggggcgagcgagatcgggtgtctcgttgggaagaacggtgtccgccctgaccctgagaaggtcagagtgatcaatgagtggccgacgccgtcgaacgtcaaggaactgcggcagttccttggcttggccacgtacttgtgcaagtacgtgaaggactacgcgggcatgatacgcccgctatcacagctcctgaagaaggacgtcgagtggatttggactgctgagagtcagcaggccttcgatgcagtcaagcggggcttgactgaggcgctgatcttggcggatgccgaccaagatcgcccattccacgttgtgtgtgacgcatccgacttcgcaatcggatgtgcgttgatgcagcacgatcacgagggccttgatcgtgtcgtctactaccaatcgcgtcagctgaagccagctgagcgcaactacccggtacatgacaaggagctccttgccatgaagtacgcactcgcgaagttccgagtgtatctactcggaagcaaaccgttcgtggtctacacagaccacgcgtcgctgtggacggctgtgaagtcgccgcacatctcgcaacggatggcgagatggctctcattctacgcagagtataacttccgggttaagtacaaacccggaagactcaatgtggtggccgacgcgctctcgcgtcgacctgactacgccacgactgatgccgacatcaatgccattgacgccatgtgatcgagcaccccaacgtcgtcactgttggacgacgtgaaggtcgcgttcgcacacgacgcggacgcgaagctcttgctggcctacggctcagcgccttctgaccaagctcgtcagaagctgccgaagcattttcgtgctcgtacacaccgttaccgggtgcacgacgggttattactctacagtgcagtcgacgacaacgcggtccgcgttgtcgtgcccaatgaccatgacctgcgactcaggatcatgtacgagtatcacgatgcaccgactgcggggcatccgggccgtgagaagacatacctttttctcacgcgaggcttctactgggcccaccagtacaaatgggtgcgcaagtacgtccgtgttcgcgaggtttgtcaacgtgtgaagcctgcgcctttcgcgcaggctcccttgcagtcactaccaactccacgagagtgttggcagtccatgtctttggacttcgtgttcggtcttcccccggacagtcaggggaacacgggcgttgtggtctttgttgactgcttcagcaagatggaatatcttgctgcggtacccgctgaagtgactgcgaagcagactgcacgtctgttcgtcgacatggtgtttaaacaccatggcatgccaatcgacattgtgtcggatcgagacccgcgcttcactgcgcacctttggcaagaagtgtttatacttcttgggagtcaactttcaatgtcgactgcggaccatccgcagacggacgggcagaccgagcgcgtgaaccgcgtgctcgtagacgtgcttaagagctacgctgactcgttccaacactggagcgagtgcctgccgatggcggagttcgctatgaacaactcggtgcatgcctcgaccgggtatacacccttctacatgaatgccatgaggcacccacgcctcccgagtctactcgggatggtggctccttccataagtgggggaggatctccgacagcaccgcagcagccgcagaatgccgctgacacttgcacagtgtcagccgcaacgatacgaagcaaagccgagaaccgcgcgtctgtgcagggcacagacgccgacaagcgcacgaagaacgtgtctgtgcgaggcacagacaccaacaagaagaagaagaagaagaagaagaagaagaagaagaagaagaacgggtctgtgcagggcacagacaccgcgaagacgaacgcagaggccgggcctactgctggaaacgagctgaacgagttcagctcggacgcaatcaacttcgtgcagcgcagacaagccgtcattcggtttgtccaagacgctattgcagcttctgtcgaccgacagaagctgaacgcagacaatgttggcaggggcaacactaatgaattcgagaagggttcattagtcttgttagctactcaaatcctgcctaaacacgccgtttccgacttcggggcgagcaagctcgctccgcgcttcatcggaccgttcactgtgctggcacggcacggcaacgcctacacactggacataccgtctagtatgcgcctccatccgacgttctacgtcggacggctgaagccatacctgcagcacgagctacctagctcggctgaaccgaagcagaagactcggcggaagccatcatcctctccagcgcgacttcgcgctggagcagcgggtcgagctaatggtccagctcggccggaacgatcgaggcggcctgggaggccgccgcaaactgcgaatacttcagagcgccgaacgcagcgctctggaactactccacgaccgggacttggtcgtggggagactcgagatcagggtcaacaccaagttgaccacacacggggtgtgtttccgccaccgccgccgccgattcgtgatgcacacggctcaactcgatggattgttgagcggattgttgatcacagtatcccgagaacgaacaggcaaccggttcgttttcgtatccgttggagaggattccctcccaaccaagatacatggtagccgcggaacgtcttgctcgaagacgtcccggacatggtgagggcgtacgaagcccaccatgcgctgcacactgggacgtaatgcgagcgctgctgttaacagcagcgcccgaagacacttcgagggcagacataggtacctgccccccgcggcagcgacgcgcttcgcacgttgccgcacatgctactcagcagcagagaggttctccactgctgcgccagcggtcttcaacttcgacgcgctcgttccattacgagcgcactctcttcaacgtcacgcattggccaggcggtcaatggtagttgacgtgccgggaccggcacgtctaaccttgacggggggatggtgtaacggggttacacgcacaagtggctacagtcacttgtaactctaacagacacgacgtctgttagtggttcgaaagactttctcgaccttggtgtagacacaccaaaggctacatacatttaggatcaccacgacgggtggtccatagagacttaggattcctattggttgagagcagcatcttttagccaatgagtgacatgcatagcattggaattctgccctccagccgttggcagattcctagtttagaatattacatttagaggaagtcagaaacataaaacacaaatagcagttctcatcttttaccaaaacacgctacttggagtctttatcttgtttaaaatatactcgtggacctcgagtatacttaactcaagtaaaagaaacctacgcttcctcatacacgtgcgcatacgtgtaagccgtagtagtgagccaaggtaggcccattacacatcggcgatttctggcagtcacctgacggcgctaccaacgacgtacagctacaacagttagcactcctacgacgaaaagacgatctcgcctcagatcagggcgcgtttggatgatggacttggagaatccgatgattggtggtcttgtttggtcttcaatgtcaagtaaccgctgctagatatgcaactgagcgtggggtggcatggtgcgcccctcaccgtatggattgaagacgagttgtcggcgtccggttgctgcttcatcaacaacttggtgacgaagaagctttggatgctttcgttgaacatcggctcgttttggttgccgctttcgcagccttgtcgtattgcgccgagctttggcttgttttggttgctgctattgcagctttatggctattgcgccgagcctccgctcgctcgtctgctgctttcgcagctttatggatattgcgtcgacctttggctcgttttggttgctgctttcgcagctgagtaattattgcgttggggtttggctcgctcgtctgctgctttcgcagctttatggatattgcgtcgagctttggctcgatcgttcactgccggtaccactttgcgattattgcgtcgagcttggctcgttcgttcgctgccggctaggtcgtcgagtttcggatcgttcgttcattgccggtaccactttgcgattattgtgtcgagcttggctcgttcgttcgctgccggctggggcgttgagtttcgaatcgttcgttcaccgccggtaccactttgcgattattacgtcgagcttggctcgttcgttcgctgccggctaggtcgtcgagttttggatcgttcgatcactgccggtaccactttgcgattattgcgtcgagcttggctcgttcgttcgctgccggctaggtcgtcgagttttggatcgttcgatcaccgccggtaccgctttgcgattattgcgtcgagcttggctcgttcgttcgctgccggctaggtcgtcgagttttagctcgttcgttcaccgccagtacagctttgcgattattgcgtcgagcttggctcgttcgttcgctgccggctaggtcgtcgagtttcggatcgttcgttcactgccggtaccactttgcgattattgtgtcgagcttggcccgttcgttcgctgccggctggggcgttgagtttcgaatcgttcgttcaccgccggtaccactttgcgattattgcgtcgagcttggctcattcgttcgctgccggctggggcgtcgagtttcggatcgttcgttcactgccggtaccactttgcgattattgtgtcgagcttggctcgttcgttcgctgccggctaggtcgtcgagtttcggatcgttcgttccccgccggtaccactttgcgattattgtgtcgagcttggctcgttcgttcgctgccggctggggcgtcgagtttcagatcgttcgttcactgccggtaccactttgcgattattgggtcgagcttggctcgttcgttcgctgccagctaggtcgtcgagtttcggatcgttcgttcaccgccggtaccgctttgcgattattgcgtcgagcttggctcgttcgttcgctgccagctaggtcgtcgagtttcggatcgttcgttcaccgccagtaccactttgcgattattgcgtcgagcttggctcgttcgttcgctgccggctggggcgtcgagtttcagatcgttcgatcactgccggtaccactttgcgattattgcgtcgagcttggctcgttcgttcgctgccggctggggcgtcgagtttcagatcgttcgttcaccgccggtaccactttgcgattattgcgtcgagcttggctcgttcgttcgctgccagctaggtcgtctagtttcggatcgttcgttcaccgccagtaccactttgcgattattgcgtcgagcttggctcgttcgttcgctgccggctaggtcgtcgagtttcggatggttcgttcactgccggtaccactttgcgattattgcgtcgagcttggctcgttcgttcgctgccggctggggcgtcgagtttcggatcgttcgttcaccgccagtaccactttgcgattattgcgtcgagcttggctcattcgttcgctgccggctaggtcgtcgagtttcggatcgttcgttcactgccggtaccactttgcgattattgtgtcgagcttggctcgttcgttcgctgccagctaggtcgtcgagtttcggatcgttcgttcaccgccagtaccactttgcgattattgcgtcgagcttggctcgttcgttcgctgccggctggggcgtcgagtttcagatcgttcgttcaccgccagtaccactttgcgattattgcgtcgagcttggctcgttcgttcgctgccagctaggtcgtcgagtttcggatcgttcgttcactgccggtaccactttgcgattattgcgtcgagcttggctcgttcgttcgctgccggctaggtcgtcgagtttcggatggttcgttcactgccggtaccactttgcgatttttgcgtcgagcttggctcgttcgttcgctgccggctaggtcgtcgagttttggatcgttcgttcaccgccagtaccactttgcgattattgcgtcgagcttggctcattcgttcgctgccggctggggcgtcgagtttcagatcgttcattcactgccggtaccactttgcgattattgtgtcgagcttggctcgttcgttcgctgccagctaggtcgtctagtttcggatcgttcgttcaccgccagtaccactttgcgattattgcgtcgagcttggctcgttcgttcgctgccggctaggtcgtcgagtttcggatggttcgttcactgccggtaccactttgcgattattgcgtcgagcttggctcgttcgttcgctgccggctggggcgtcgagtttcggatcgttcgttcaccgccagtaccactttgcgattattgcgtcgagcttggctcattcgttcgctgccggctaggtcgtcgagtttcggatcgttcgttcactgccggtaccactttgcgattattgcgtcgagcttggctcgttcgttcgctgccagctaggtcgtcgagtttcggatcgttcgttcaccgccggtaccactttgcgattattgcgtcgagcttggctcgttcgttcgctgccggctaggtcgtcgagtttcggatcgttcgttcaccgccggtaccactttgcgattattgcgtcgagcttggctcgttcgttcgctgccggctaggtcgtcgagtttcggatcgttcgttcaccgccggtaccactttgcgattattgcgtcgagcttggctcgttcgttcgctgccggctaggtcgtcgagtttcggatcgttcgttcaccgccggtaccactttgcgattattgcgtcgagcttggctcgttcgttcgctgccggctaggtcgtcgagtttcggatcgttcgttcaccgccggtaccactttgcgattattgcgtcgagcttggctcattcgttcgctgccggctggggcgtcgagtttcggatcgttcgttcaccgccggtaccgctttgcgattattgcgtcgagcttggctcgttcgttcgctgccagctaggtcgtcgagtttcggatcgttcgttcactgccggtgcagctttgcgattattgcgtcgagcttggctcgttcgttcgctgccggctaggtcgtcgagtttcggatcgttcgttcaccgccagtaccactttgcgattattgcgtcgagcttggctcgttcgttcgctgccagctaggtcgtcgagtttcggatcgttcgttcaccgccggtaccactttgcgattattgcgtcgagcttggctcgttcgttcgctgccggctaggtcgtcgagtttcggatcgttcgttcaccgccagtaccactttgcgattattgcgtcgagcttggctcgttcgttcgctgccggctggggcgtcgagtttcagatcgttcgttcactgccggtaccactttgcgattattgcgtcgagcttggctcgttcgttcgctgccagctaggtcgtcgagtttcggatcgttcgttcaccgccagtaccactttgcgattattgcgtcgagcttggctcgttcgttcgctgccggctaggtcgtcgagtttcggatcgttcgttcactgccggtaccactttgcgattattgcgtcgagcttggctcgttcgttcgctgccggctaggtcgtcgagttttggatcgttcgttcaccgccggtaccactttgcgattattgcgtcgagcttggctcgttcgttcgctgccggctaggtcgtcgagttttggatcgttcgttcaccgccagtaccactttgcgattattgcgtcgagcttggctcgttcgttcgctgccggctggggcgtcgagtttcagatcgttcattcactgccggtaccactttgcgattattgcgtcgagcttggctcgttcgttcgctgccagctaggtcgtctagtttcggatcgttcgttcaccgccagtaccactttgcgattattgcgtcgagcttggctcgttcgttcgctgccggctaggtcgtcgagtttcggatcgttcgttcactgccggtaccactttgcgattattgcgtcgagcttggctcgttcgttcgctgccggctaggtcgtcgagtttcggatcgttcgttcaccgccagtaccactttgcgattattgcgtcgagcttggctcgttcgttcgctgccagctaggtcgtcgagtttcggatcgttcgttcaccgccggtaccactttgcgattattgcgtcgagcttggctcgttcgttcgctgccggctaggtcgtcgagtttcggatcgttcgttcactgccggtaccactttgcgattattgcgtcgagcttggctcgttcgttcgctgccggctaggtcgtcgagtttcggatcgttcgttcaccgccagtaccactttgcgattattgcgtcgagcttggctcgttcgttcgctgccggctggggcgtcgagtttcagatcgttcgttcactgccggtaccactttgcgattattgcgtcgagcttggctcgttcgttcgctgccagctaggtcgtcgagtttcggatcgttcgttcaccgccagtaccactttgcgattattgcgtcgagcttggctcgttcgttcgctgccggctaggtcgtcgagtttcggatcgttcgttcactgccggtaccactatgcgattattgcgtcgagcttggctcgttcgttcgctgccggctaggtcgtcgagtttcggatcgttcgttcaccgccggtaccgctttgcgattattgcgtcgagcttggctcgttcgttcgctgccagctaggtcgtcgagtttcggatcgttcgttcaccgccagtaccactttgcgattattgcgtcgagcttggctcgttcgttcgctgccggctggggcgtcgagtttcagatcgttcgatcactgccggtaccactttgcgattattgcgtcgagcttggctcgttcgttcgctgccggctggggcgtcgagtttcagatcgttcgttcaccgccggtaccactttgcgattattgcgtcgagcttggctcgttcgttcgctgccagctaggtcgtctagtttcggatcgttcgttcaccgccagtaccactttgcgattattgcgtcgagcttggctcgttcgttcgctgccggctaggtcgtcgagtttcggatggttcgttcactgccggtaccactttgcgattattgcgtcgagcttggctcgttcgttcgctgccggctggggcgtcgagtttcggatcgttcgttcaccgccagtaccactttgcgattattgcgtcgagcttggctcattcgttcgctgccggctaggtcgtcgagtttcggatcgttcgttcactgccggtaccactttgcgattattgtgtcgagcttggctcgttcgttcgctgccagctaggtcgtcgagtttcggatcgttcgttcaccgccagtaccacttgcgatannnnnnnnnnnnnnnnnnnnnnnnnnnnnnnnnnnnnnnnnnnnnnnnnnnnnnnnnnnnnnnnnnnnnnnnnnnnnnnnnnnnnnnnnnnnnnnnnnnnttctcactgcaagaaccaagatgacaagcctgaccttgtcatcctgaatgtgaactcgatgagagcaagcggctctctccgtgctttggtagattctggcgcgtcgaagaactttgttcgactgcgaagtctatcaaggcttgacttcgaggaggtaaagatacctcgaagtatgttggaagtacgactggcaacgggcgccgtcgtgaagaccgagaagcgcatggtacgcgtgtacttcacgtatgaagatcaagagtttgtcgagacctttatcgtcctggatctggacgataagtttgacattgtattgggcatgccgtggcttgcacggcatgatccggtcatcgattgggagaagcgcactctcgtgcgcttcggtcgcgacagcagaacagtgagcgatggccctgttgccgctacacacgcaccaacaggtgcgcgcgactccccactcgagacagcgcctaatgccgctgtcccggagcgccctgggcgcgcgagagcacacgcgcaagagcagtaagcgtcggcgtcgccgccgacggctaaaggagaaaatgtgttgatctcggagatcgacgcccgcgtttcagcgaatcaggtagagtctccgacctcaagaggtacggatgacgcaggcgagtcacacgcctcagccgtggaggctgacgcgattctgattggatcagttttggccaataataagagccaaggtaacgaaacaccgtcgactccgggagtcgatggctggggtgaatttgattcgtcggctcggggagccgacgcatcctccgtaatgggggtctccgccaatggttggcgtcgaggtgaagacggcgtgtcggctccgggagccgacgctgcagacggtgcggacggttgcaaacgttccgcaccggaaaaacttgcatgctgtcgtgcagccgggggctgctcgacgaagcgccgggcgaccaagccgggcttgaagtcgctcgcccgcgggatgaacccgccggcggtactgaagaagaacacccgtccacggctgggcctggacgaggtcaagagtcatgcggagccgggctccgcaggacaagaagacggcgcatgcgaaggtcgctgcgcaggtctcggcctggggtcgagacgctacaagaaatgtctgccgggcagacggaggctgagaagccggacgtcgagacgttgaacgtcttcacgcgtacctgtgccgggttccggtacagggagatgactctcgcgaaccctctgacgcaagcgtcggagttgacttcgcttccagtcatgagctggaaacgcttcgcgcgtgacttgcacgatggacgcatcgaggaaatatgcattctctcggacaccgagagaacgaagagcgagaatgaagaactgaggcagttcttcatggagagcaccactgagagcgaggacacctcagtgcgaagacgaagaaggagcgctttgaagagcagagctgggactcgttgaaaacgagtccctactacgagatcttacgggagtacgcggacgtacttccggaagagattcctgcggagcttccgcaggacaagggaatccagcacgagattgatctcgtgccggggacgaagtactgtgtcacgcgacagtggccactgccgcgagagcaggtcaaggcgatcgacgacttctttgagagtcgtcgcaaagctggacaagtgcgggaatcgaaatccccgcacagtgctccgacgttctgtgtcaagaagccacagggtggttggcgcatcgttcatgcgtacaacaagctgaacgatgcgacgataccggcgcagacaccgataccgcgaaaagatgtcatcatcgattcgatggccatgagcactatctacagtgctcttgatctgcgcgatggattctatcagatcctcatgcgtgagagcgatatccctctcacggttgtgagcacgccgagcggcatgctctgggagtggctagtgatgccgtatggtctgaagaacgcccctgcgaccttcaacaggtgcgtgacgcacttgttgcgctcggtgcgcgacttcgcaccgagctacttcgacgatgtgttcgtccacagccgagctgcggacgggatgagcgacgttgagatgcacaaggtgcatctccggaagctgcttgcgctcatgcgcaagcacaagctctatgccaacctgaagaaatgcatcttaggggcgagcgagatcgggtgtctcgttgggaagaacggtgtccgccctgaccctgagaaggtcagagtgatcaatgagtggccgacgccgtcgaacgtcaaggaactgcggcagttccttggcttggccacgtacttgtgcaagtacgtgaaggactacgcgggcatgatacgcccgctatcacagctcctgaagaaggacgtcgagtggatttggactgctgagagtcagcaggccttcgatgcagtcaagcggggcttgactgaggcgctgatcttggcggatgccgaccaagatcgcccattccacgttgtgtgtgacgcatccgacttcgcaatcggatgtgcgttgatgcagcacgatcacgagggccttgatcgtgtcgtctactaccaatcgcgtcagctgaagccagctgagcgcaactacccggtacatgacaaggagctccttgccatgaagtacgcactcgcgaagttccgagtgtatctactcggaagcaaaccgttcgtggtctacacagaccacgcgtcgctgtggacggctgtgaagtcgccgcacatctcgcaacggatggcgagatggctctcattctacgcagagtataacttccgggttaagtacaaacccggaagactcaatgtggtggccgacgcgctctcgcgtcgacctgactacgccacgactgatgccgacatcaatgccattgacgccatgtgatcgagcaccccaacgtcgtcactgttggacgacgtgaaggtcgcgttcgcacacgacgcggacgcgaagctcttgctggcctacggctcagcgccttctgaccaagctcgtcagaagctgccgaagcattttcgtgctcgtacacaccgttaccgggtgcacgacgggttattactctacagtgcagtcgacgacaacgcggtccgcgttgtcgtgcccaatgaccatgacctgcgactcaggatcatgtacgagtatcacgatgcaccgactgcggggcatccgggccgtgagaagacatacctttttctcacgcgaggcttctactgggcccaccagtacaaatgggtgcgcaagtacgtccgtgttcgcgaggtttgtcaacgtgtgaagcctgcgcctttcgcgcaggctcccttgcagtcactaccaactccacgagagtgttggcagtccatgtctttggacttcgtgttcggtcttcccccggacagtcaggggaacacgggcgttgtggtctttgttgactgcttcagcaagatggaatatcttgctgcggtacccgctgaagtgactgcgaagcagactgcacgtctgttcgtcgacatggtgtttaaacaccatggcatgccaatcgacattgtgtcggatcgagacccgcgcttcactgcgcacctttggcaagaagtgtttatacttcttgggagtcaactttcaatgtcgactgcggaccatccgcagacggacgggcagaccgagcgcgtgaaccgcgtgctcgtagacgtgcttaagagctacgctgactcgttccaacactggagcgagtgcctgccgatggcggagttcgctatgaacaactcggtgcatgcctcgaccgggtatacacccttctacatgaatgccatgaggcacccacgcctcccgagtctactcgggatggtggctccttccataagtgggggaggatctccgacagcaccgcagcagccgcagaatgccgctgacacttgcacagtgtcagccgcaacgatacgaagcaaagccgagaaccgcgcgtctgtgcagggcacagacgccgacaagcgcacgaagaacgtgtctgtgcgaggcacagacaccaacaagaagaagaagaagaagaagaagaagaagaagaagaagaagaacgggtctgtgcagggcacagacaccgcgaagacgaacgcagaggccgggcctactgctggaaacgagctgaacgagttcagctcggacgcaatcaacttcgtgcagcgcagacaagccgtcattcggtttgtccaagacgctattgcagcttctgtcgaccgacagaagctgaacgcagacaatgttggcaggggcaacactaatgaattcgagaagggttcattagtcttgttagctactcaaatcctgcctaaacacgccgtttccgacttcggggcgagcaagctcgctccgcgcttcatcggaccgttcactgtgctggcacggcacggcaacgcctacacactggacataccgtctagtatgcgcctccatccgacgttctacgtcggacggctgaagccatacctgcagcacgagctacctagctcggctgaaccgaagcagaagactcggcggaagccatcatcctctccagcgcgacttcgcgctggagcagcgggtcgagctaatggtccagctcggccggaacgatcgaggcggcctgggaggccgccgcaaactgcgaatacttcagagcgccgaacgcagcgctctggaactactccacgaccgggacttggtcgtggggagactcgagatcagggtcaacaccaagttgaccacacacggggtgtgtttccgccaccgccgccgccgattcgtgatgcacacggctcaactcgatggattgttgagcggattgttgatcacagtatcccgagaacgaacaggcaaccggttcgttttcgtatccgttggagaggattccctcccaaccaagatacatggtagccgcggaacgtcttgctcgaagacgtcccggacatggtgagggcgtacgaagcccaccatgcgctgcacactgggacgtaatgcgagcgctgctgttaacagcagcgcccgaagacacttcgagggcagacataggtacctgccccccgcggcagcgacgcgcttcgcacgttgccgcacatgctactcagcagcagagaggttctccactgctgcgccagcggtcttcaacttcgacgcgctcgttccattacgagcgcactctcttcaacgtcacgcattggccaggcggtcaatggtagttgacgtgccgggaccggcacgtctaaccttgacggggggatggtgtaacggggttacacgcacaagtggctacagtcacttgtaactctaacagacacgacgtctgttagtggttcgaaagactttctcgaccttggtgtagacacaccaaaggctacatacatttaggatcaccacgacgggtggtccatagagacttaggattcctattggttgagagcagcatcttttagccaatgagtgacatgcatagcattggaattctgccctccagccgttggcagattcctagtttagaatattacatttagaggaagtcagaaacataaaacacaaatagcagttctcatcttttaccaaaacacgctacttggagtctttatcttgtttaaaatatactcgtggacctcgagtatacttaactcaagtaaaagaaacctacgcttcctcatacacgtgcgcatacgtgtaagccgtagtagtgagccaaggtaggcccattacacatcggcgatttctggcagtcacctgacggcgctaccaacgacgtacagctacaacagttagcactcctacgacgaaaagacgatctcgcctcagatcagggcgcgtttggatgatggacttggagaatccgatgattggtggtcttgtttggtcttcaatgtcaagtaaccgctgctagatatgcaactgagcgtggggtggcatggtgcgcccctcaccgtatggattgaagacgagttgtcggcgtccggttgctgcttcatcaacaacttggtgacgaagaagctttggatgctttcgttgaacatcggctcgttttggttgccgctttcgcagccttgtcgtattgcgccgagctttggcttgttttggttgctgctattgcagctttatggctattgcgccgagcctccgctcgctcgtctgctgctttcgcagctttatggatattgcgtcgacctttggctcgttttggttgctgctttcgcagctgagtaattattgcgttggggtttggctcgctcgtctgctgctttcgcagctttatggatattgcgtcgagctttggctcgatcgttcactgccggtaccactttgcgattattgcgtcgagcttggctcgttcgttcgctgccggctaggtcgtcgagtttcggatcgttcgttcattgccggtaccactttgcgattattgtgtcgagcttggctcgttcgttcgctgccggctggggcgttgagtttcgaatcgttcgttcaccgccggtaccactttgcgattattacgtcgagcttggctcgttcgttcgctgccggctaggtcgtcgagttttggatcgttcgatcactgccggtaccactttgcgattattgcgtcgagcttggctcgttcgttcgctgccggctaggtcgtcgagttttggatcgttcgatcaccgccggtaccgctttgcgattattgcgtcgagcttggctcgttcgttcgctgccggctaggtcgtcgagttttagctcgttcgttcaccgccagtacagctttgcgattattgcgtcgagcttggctcgttcgttcgctgccggctaggtcgtcgagtttcggatcgttcgttcactgccggtaccactttgcgattattgtgtcgagcttggcccgttcgttcgctgccggctggggcgttgagtttcgaatcgttcgttcaccgccggtaccactttgcgattattgcgtcgagcttggctcattcgttcgctgccggctggggcgtcgagtttcggatcgttcgttcactgccggtaccactttgcgattattgtgtcgagcttggctcgttcgttcgctgccggctaggtcgtcgagtttcggatcgttcgttccccgccggtaccactttgcgattattgtgtcgagcttggctcgttcgttcgctgccggctggggcgtcgagtttcagatcgttcgttcactgccggtaccactttgcgattattgggtcgagcttggctcgttcgttcgctgccagctaggtcgtcgagtttcggatcgttcgttcaccgccggtaccgctttgcgattattgcgtcgagcttggctcgttcgttcgctgccagctaggtcgtcgagtttcggatcgttcgttcaccgccagtaccactttgcgattattgcgtcgagcttggctcgttcgttcgctgccggctggggcgtcgagtttcagatcgttcgatcactgccggtaccactttgcgattattgcgtcgagcttggctcgttcgttcgctgccggctggggcgtcgagtttcagatcgttcgttcactgccggtaccactttgcgattattgggtcgagcttggctcgttcgttcgcagccagctaggtcgtcgagtttcggatcgttcgttcactgccggtaccactttgcggttattgcgtcgagcttggctcgttcgttcgctgccggctaggtcgtcgagtttcggatcgttcgttcactgccggtgcagctttgcgattattgcgtcgagcttggctcgttcgttcgctgccggctaggtcgtcgagtttcggatcgttcgttcactgccggtgcagctttgcgattattgcgtcgagcttggctcgttcgttcgctgccggctaggtcgtcgagtttcggatcgttcgttcagctttgcgattattgcgtcgagcttggctcgttcgtttgctgccggctaggtcgtcgagtttcggatcgttcgttcaccgccagtaccactttgcgattattgcgtcgagcttggctcgttcgttcgctgccagctaggtcgtcgagtttcggatcgttcgttcactgccggtaccactttgcgattattgcgtcgagcttggctcgttcgttcgctgccggctggggcgtcgagtttcggatcgttcgttcactgccggtgcagctttgcgattattgcgtcgagcttggctcgttcgttcgctgccggctaggtcgtcgagtttcggatcgttcgttcaccgccagtaccactttgcgattattgcgtcgagcttggctcgttcgttcgctgccagctaggtcgtcgagtttcagatcgttcgttcactgccggtaccactttgcgattattgcgtcgagcttggctcgttcgttcgctgccagctaggtcgtcgagtttcggatcgttcgttcaccgccagtaccactttgcgattattgcgtcgagcttggctcgttcgttcgctgccggctggggcgtcgagtttcagatcgttcgttcactgccggtaccactttgcgattattgcgtcgagcttggctcgttcgttcgctgccggctaggtcgtcgagtttcggatcgttcgttcactgccggtaccactttgcgattattgcgtcgagcttggctcgttcgttcgctgccggctaggtcgtcgagtttcggatcgttcgttcactgccggtaccactttgcgattattgggtcgaggttggctcgttcgttcgctgccagctaggtcgtcgagtttcggatcgttcgttcactgccggtaccactttgcggttattgcgtcgagcttggctcgttcgttcgctgccggctaggtcgtcgagtttcggatcgttcgttcactgccggtgcagctttgcgattattgcgtcgagcttggctcgttcgttcgctgccggctaggtcgtcgagtttcggatcgttcgttcaccgccagtaccactttgcgattattgcgtcgagcttggctcgttcgttcgctgccggctggggcgtcgagtttcagatcgttcgttcactgccggtaccactttgcggttattgcgtcgagcttggctcgttcgttcgctgccggctaggtcgtctagtttcggatcgttcgttcaccgccagtaccactttgcgattattgcgtcgagcttggctcgttcgttcgctgccggctaggtcgtcgagtttcggatcgttcgttcactgccggtgcagctttgcgattattgcgtcgagcttggctcgttcgttcgctgccggctaggtcgtcgagtttcggatcgttcgttcaccaccagtaccactttgcgattattgcgtcgagcttggctcgttcgttcgctgccagctaggtcgtcgagtttcggatcgttcgttcactgccggtaccactttgcggttattgcgtcgagcttggctcgttcgttcgctgccggctaggtcgtcgagtttcggatcgttcgttcactgccggtgcagctttgcgattattgcgtcgagcttggctcgttcgttcggtgccggctaggtcgtcgagtttcggatcgttcgttcactgccggtaccactttgcgattattgcgtcgagcttggctcgttcgttcgctgccggctgggtcgtcgagtttcagatcgttcgttcactgccggtaccactttgcgattattgcgtcgagcttggctcgttcgttcgctgccagctaggtcctcgagtttcggatcgttcgttcactgccggtgcagctttgcgattattgcgtcgagcttggctcgttcgttcgctgccggctaggtcgtcgagtttcagatcgttccttcgctgccggtaccactttgtgattattgcgtcgagcttggctcgttcgttcgctgccggctaggtcgtcgagtttcggatcgttcgttcactgccggtaccactttgcgattattgtgtcgagcttggctcgttcgttcgctgccggctggggcgttgagtttcggatcgttcgttcaccgccggtaccgctttgcgattattgcgtcgagcttggctcgttcgttcgctgccggctaggtcgtcgagtttcggatcgttcgttcactgccggtacagctttgcgattattgcgtcgtgcttggctcgttcgttcgctgccggctggggcgtcgagtttcggatcgttcgttcaccgccggtaccactttgtgattattgcgtcgagcttggctcgttcgttcgctgccagctaggtcgtcgagtttcggatcgttcgttcactgccggtaccactttgcgattattgcgtcgagcttggctcgttcgttcgctgccagctaggtcctcgagtttcggatcgttcgttcactgccggtgcagctttgcgattattgcgtcgagcttggctcgttcgttcgctgccggctaggtcgtcgagtttcggatcgttcgttcactgccggtacagctttgcgattattgcgtcgtgcttggctcgttcgttcgctgccggctggggcgtcgagtttcggatcgttcgttcaccgccggtaccactttgtgattattgcgtcgagcttggctcgttcgttcgctgccagctaggtcgtcgagtttcggatcgttcgttcactgcaggtaccactttgcgattattgcgtcgagcttggctcgttcgttcgctgccagctaggtcctcgagtttcggatcgttcgttcactgccggtgcagctttgcgattattgcgtcgagcttggctcgttcgttcgctgccggctaggtcgtcgagtttcagatcgttccttcgctgccggtaccactttgtgattattgcgtcgagcttggctcgttcgttcgctgccggctaggtcgtcgagtttcggatcgttcgttcactgccggtaccactttgcgattattgtgtcgagcttggctcgttcgttcgctgccggctggggcgttgagtttcggatcgttcgttcaccgccggtaccgctttgcgattattgcgtcgagcttggctcgttcgttcgctgccagctaggtcgtcgagtttcggatcgttcgttcaccgccagtaccactttgcgattattgcgtcgagcttggctcgttcgttcgctgccggctaggtcgtcgagtttcggatcgttcgttccctgccggtaccgctttgcgattattgcgtcgagcttggctcgttcgttcgctgccggctggggcgttgagtttcggatcgttcgttccctgccggtaccgctttgcgattattgcgtcgagcttggctcgttcgttcgctgccggctggggcgttgagttttggatcgttcgttcactgccggtgcagctttgcgattattgcgtcgagcttggcttgttcgtctgcggtttgtgcagttgtgtgattgccacgtcgagtggcgcgcttactaacttggccacgttttattgcttaaccctctttatggggtttttcgctccctcatcatggccaagtgtgtgtgtgaaaatgctgatttcctgaacacaagcccggatatggacgcggactggctgtggagtgcccgcgaaccgatgtggctttctactgttggataccatgccaccgagtttgtggagatgcgtcatcagagcaaatgaggtaccacgtcaaagcacagatggccgagcccgtgtcggccgtgaacttgagacactatagaaacaacgaccggtttgggggtctcatgatcaatcgtgttaatgggccactcattgggggctgccattcggcacattgccctctaaccaaagtgactcatgactttggcccattaacacaatgaaacacttgatacccccaatacctggatgcattgagaaaaaaagaaaaagaaagaaaaagtgacctaatgcattcgcttatgtccgtcgcacgcacagtatccgtaagatgtaatatacgaatgtattatcgataagctctgctacatcctaaatatacagcagcatgcgggccaaacgctctcggtgggcaccccaggctttgcgccgtgtacgtcgaagcgtttgctagaagacccttcttcagtagactcccctacctggtaagcgcctgaacgacgcttgcgctgctgtggagcgctagttgaagccgttgctaccgctgcggatgcattcatggaggtggttggtccaggagtgacgaacgcgcgtctcgatacttagcggtagccggcatcaccgcctcgcgcgcttgaatacaattccagcctgactttagacattatatcgaacagactgtaaatagacttgcttacctttagcatcactgccacgagtagactgttatggcgacctcgagctcccagtagcgcctggccctcgcttacgcagcagcactagcacgttcttgccgggcttgcagagctcgaggtacgtctggtcagggcggtttctcgttccgaagtaaaaggcaccgcgagtggctgccaaacggtcacttcggccttacaccccaattgtccaacctgttggggatttatactcgtccatcaatagccgcagaagaatccgcgtctttctacccatcacagatccaacaggaatgatgggctgattactcactatacaaaaaaactatatgcaaagttttttgcggaaaccaagtttgctggatattaaatcctgtcgaaatgattattctgtatcctacagaatatggggctagaggggttaagcccgtctatatacatcgaggattactccaaattactccatttccggacttactcatactgacgccggttttactcgaacttacactcttgtgcttccgatggaaggataaagccacgttgaagaagtaaatttatcatcactttatggattgctgctccgtcgtaacgaagactaagtgctgctttcaaacgaggtgcgtatgcatatcaacttccccatgcaatgacacgcgtttttttatttagctttattgtaccgggggcactctcttagtctaccggtagacaaactccaagattacagcacatcctcacaacttatcaagctatcgtccaggcacctactacactagcggtagctagtactgatattaatacgaaaaaaaggctctagtagatcaccaaaatcatcatacggcagatccagtagaagagattttatttggtctactatggtagccattaaaatcctaaagaagatttcatcatcaccaccaacggtgattctcttggtatctgcatgctgcttactgtcctggttgctcgaggattaatagaaaactgtcgatacagtcctccatcaacctgccttgttctaccgtttggggacacgacttatccctccttgctattgcctttaactgtcgaacccctgtcacccggaactcgacacaacttttctctgccgatgttgattctccttgaaagatgagcctgttgcgctgcatccattgcgttgtgctgcaaacagttgctaacactcgccaaatgcgtcgtaatgtgtcttcatgcttggtcgtgcaagtccccgacgtgagagctactctcctcttcattgagtccgggatcgggggagcttgccgtgccgcacagtactctcggtactcgataaggtcgctgtcagacacatcagtgtctagcctaccatttccagcatctcaccgcacacggacattcccagaaaatatgactctgggtttctttaactcctgtgttttcctgcacgtgttgtcgtgttgtctcccttcaaagtacagatcaagctgtcggagggctattccgtaccccgtccacacttgatagggcgtgagggagttatcatggctccataactgcttgggccgttgttgctgtagccctctttgccactgatcttgttgcgcctgcctctccaatcgcttcaggatcacgccgataccacctcggagctctgttccaaaacgcacaaacgcttgtcgatttaacccctttacaacgtgtttgttcttgattgtttcctctgctgtccaaggatactgatgaatgcgcggatgtgcgtaaaaagcaactccttccacttgagcccacttctgcatagtctgcgcatcttcctccgaaccattctccacatcgacctcccagttgatgccgttgggcagttgcctgcatttgatttgcagactagccatctgagtgaattggctgtacctgtgagagttcctgatggacctagccgccacgacgcacctcttagccattgcggcggatgccttaacttgaacggtgggtcgtgccgtccttctagccacttttgcggagatagtaagatgacaatgatcgcccacttacacatggtcgtgtgacggtgcctacgtctttcatttgattcctgatcgattcgaaacgaatatcgcccctctgcttcttgccgatgttcgagttgatcgagtgtgccattccgtattcgtgaaaatcttcttgcgcttaacataactcctctcggtgccgtcaaccatgggttgtcactccaaccaaaggttccccaaaatgtttcaatgtgctccggccatgcgagtcgaggaggctcgacctcgatattgagctggatcacgaatctgtcatctgggtcccaccaacttgtactcaactctaaaatgttttcgtaataattctccactagagctgttcgttgttttgcttcttcgtccgcaggctaaggccactcgtgtaatgggccccagttacataagtgggtaaattgacagtacataaagtaattaagtcagtacacggctagcgtgtactgacggtcatcatgattggctgaattgggggagccagaccccatttcagccaatcaggcgttgacctgcatttgagtggctcacatgagatcaggggtagccgccctggtcctaacataaaacagagttgattttacccaagactgactgcttggtctcactaaatccgagtcttaactaagcttcctcaccgctacgtgtaagctagtaacggacacacacctggcccgttacaactcgctgatgagctgcattcctggctctaatttctggggttttgtgttagattttctcggtgaggctgatcatacggcaggtccacaagtctcagcttgcagatacatcatcaacgaacggttggtggggttgagcgcctactgcatttcattctacaatccgacaagacgcgaacaacccgaccgatactacgaagcatgcgtgtcccatacttccttcatcttgtgttcgcaatttccgcgatcctgcacatacccacccacgccgaggaaccaagtacgctggacagccgcgggggtcactattgttggcacaacaaatggagggggtccgacacttgagcacttgggggagaacctggaagtgatttattattaacctcgctacatgaggatgctttgatgggtggatctgacttgacatcctgacagatagctacagggcaacctggatgttccaacacttcccctccagcgctggacgtagcttgcgcttacattgcgtgcactcacgttttgttgtcgaacaggagcaagcggtggcctccgcgctcgctttccaccgcatcgtcgtgagcagcctgcgcgttttcctccgtgtcggagatgaagctactgcccgcaatgttcatgtacgtctccgtggacacaccggtggccttggaatcgacttgggcacgatgttgcaaaccgcctccgagttgaacgccgtcatctgcatgttcttggccgcttcgagtggtcgagtaaaacgccttcgcctacatagctcgtgtcctcctcgatttgcgcgttcgccttgtccgcttgtcgaatctcggctgctgacaatatccgttgagccgaagcttgtcactcgtccacgccgtctttcttgccgccttcacccttgctgttaaagctgcccatgaccaatgtggtactcgctgtcttacatcgctgggaaccgcatactggaagaaagccttttccttcgcgatcgtgcattgaacgatcacccgcttcccctgcaagaacattcagtgctcgcggtcgatattgctctacaaatgaacacactctaacaaaacaaatccgtcagttcatcgaccaacgctagtgggtagtgggtatcagccaaagcgcaacacgattgtcgtgtgcaattttcttccgagccctcatctttatgggactaccctcctcgcatccgcacgactacggaacgattgttatctttccgcctcgcctcagaggacactttgatccgcggttttcgtcatcgcgagcactcaatagtgttggagagacttggatcgagttcaagcgggccacgggagcgcaggaatttagtcccagcacgcccaagtccgtgcattcagaaaatcgatttttctagtccattttcgagtcgtcaccttggtgctcgactgccctcctcacatccttacgactgcctcccacttttgttctggggaattattcagccttgcctacgcaaatcacatagcgtttgctcacgtacatgcgctttcccactttggtagctccagaaatcatcgttcctcggctaatatccaaacgggaggacaacgagactgggatggagttcaaacgggccacgggagcgcggaattatctccttttgcgcaaatccgcgcgtcaggtaattgtttggttttatcactgcattgtgagaggtgctcatagaatccaactccgtttttcttccactaaacctggatcgaggcgtctactccacgtgcagaattcttttcgggtagcattgcgatagtaatcaatccgtagagagtatcggagataaacagattcgatcagcatcgtgtagcaatgactgaatctgaaattcgcgatcgtgcttgataatcacttgatcaatcgaggagtcctcatgatggcgtcggcaattcttgaccgctgaacatcaatcgatagttcgcgcttcaaccaaacatcttccccaccttccgccggtaaaagagagtgagactacagcttcaccacgttccgctggtaaagagtgtgaggctactgcttcctgccttccgccggtaggagcgatgagactatcgtggcaacattcaatctccatagtctagaaggaatgcaaatgccgcaaatacgtgatgccaatatcgttcgccaggaacgaacagcgggatgcgttacctttatcaacttgggtgtcatgtggccaatgccagctcaataaccacagtctccgccaagctcatcgccaagaatatcacttccagcctcggtgcgttctaatgccgccaatgggaccgtcaggaagcaccactcggaccagctaaatcgtcaaaccggtgccaccgttacgaagtcgatatacatgctcaacatcgcccactggaggtccgagctgctcatccccccacttcacagacttgagcaccaagtcagatatgaacgccaattatttagtaatagctggcgccttcatgtgaatccatcacctccgccatacacttcgtgcgtatgcgtgaggagccacggagcggggcgccaacagagtcgtgtgcctcttcgcatctctgaaggacagcgtctccatctctttgtggttcgcacggagtctacaccatctaccacgagtgaacggtagcatcttcccaccgccatgcagcgtcgctcagggctcgcatctgcggctgttaacctgttggcacaacaaatggagggggtccgacacttgagcacttgggggagaacctggaagtgatttattattaacctcgctacatgaggatgcttgatgggtggatctgacttgacatcctgacagatagctacagggcaagctggatgttccaacaactatttgcgcgttgttgtaaacgaagatgcacaagaacgcttggacgaaggaggaaagtcagtcgtgggtacgaaagctaccaaggttgttcaacatcctagcaagtggtacgaagcgagaggattgggttcaataccaagcgcgctcagggctcgtttgcagagcagcccaatcagcgtcacgagagacaagcttcgcagcagtaaggaagtccagaggtgtgctggcagtgacggcaattttcctctctggtgcgctcatcataacaaccatggcaaatcgacatgactgaggggcttctgctgatgcaaacctggaaacagtcggacttctcactcagcccacggagtttggaaaataatacgaagaggctgttcgtttctgtctgttcggcagccgaatgctgtgttgatgggtgtcgttgccaggacgcccagcgccacatagccgatatatcgctgtggtgtagcgggatcggccaaaatctggttaaggcctgatcgagcttcccacctgcgcccagacaccgactaacggagggggtcccccaacgatccatgatcggctgaacttgttctcaccttgtgtacccgtcggcgggctcgatctgctctctcggggctccgaagatgcagcacttgctgaagatcgaatgtcttggcgtgacgcggggatagggcgcgggaatcttcgctctgcgtccgagtatacgctccgatcgagggttgttcgctccgatcggtcggcctggagttgatccaaggcctgtagttgcctttccgggtgtgttccttcctttcctgagttgcttgccgcttcctatagctggatcgaggttgatcgagaggagaaacgatcgccggccaagcactaatatccggtcgatcgaggacttgcacacaagagatagatcactagagtaggtcaagctggccaatgtattaatccagtcttaaccgtaccgctagttcactacccaaagtgtcgaccctgccgaggccagtgtagttcctgggacttggtgacttgaggggacttgtgctcttcggtgcaaattctgctcgagagcgacttgccggggcttggtggtcttggatcacgcgtggggtcaaatctgttctccacaacgcaagtcaatcgaggccaatatgctcttcctcctcgagattccagaccacttgcgctccacggtgcaaattcgactctgctttatgtttagctggtctctccctaatgctaccatcttgcttaccctcctacaaccacacgattactggattcttgccccgacttcgtcctccatgtgcgtcccatcctggtcgatccacgatcgtccccgatcggcgatcgactccgatcgaccccgatcggcgacccacgatcggctcccgatccacgatcgaccccgatcggcgatccgcgatcgatctcgatcggcgatccacgatcgacctcgatcggcgatcggcgatccactcccgatcgatgacttgtgccggttgccatgcgccgccgatctatcaccttctgtcctcggccatctcagatccgcgggttctgtcgtcgatctggacttgggtcggccacgaatcacgccgcggttcgggcacgatcacccacaatccggcttgccacatgtcctgccttacgcgccggcgtcatcgggccacctgagatctcccgaagaactccttctgatccggagatccttgctgcctgtctctcgattgccgatctcccacgcctccagtcgatcggccctgccgcctttctcggagaacaattcttattcagcacttctccacatcgccttttagtgtccacctctactccacaacaacagtcagttgagtgtcggtccgagtagtaaggcttgtacacagagggcgtaggaacataattcaggactgtgtaacggtactactactatgcaacctgttggggctggctcgatcacttttggtcgcttgtgccgcacaccggcaagcctgggttaccacgctctgaatgactttttggacaaccgccggcattggccttcggccatggtgttcttcagctccatgtttgctgctgttcggccgatctacccgcgggtgcgccacggggacatctttcaactgtacgaccagctttctgaggtccttttccggacacatccctcgtcgttgtcaggtttcgtgcctgcagcgacagctaccgacccaatgctctatggcgttgttcggcagcgatcggtgcggttttcccccaacctacaagatggtgattggaaatggctcgttggcacccctgccgtaccgaaacctcaccactgacagcattgggctgtaccgagggtgaggtcgcggggtggattaaaacatggaggtggatgcgtcgggttctacttcctgtagtgcacgatgtcaccatgagactctaccttggaaatgtgacgatgggggcgcgacttttctttctgagtgcgacgtcgcccctagcgcagcactgtgtacgccatggttgccgcgctatcgaaaccgccactcattgcttcttcgagtgtgagcccgtccagatactgtggcagacgctgtgggagccttgggctcctgcttttcgatgctcactggggtggcggctgctgattttcccgtccgaccgcgatgtccacgaagattggcgccaccaacgtggctttcttctcattttatggcgcatccacacgctattgtgttccacgctctgtggcgtctacggaatgacatacatttcaatggtgttcgcgtggtcagcaccagcatttctcgcttgggcttctcatttcggcaacattaccagcatctctatcgccgatcggccgagtttcatctcgtcagcgacgatataaagacatttttacgccgtctgggtttccccgaacccatcgacgacgatgatctccctgtagctacgcctgtatggatccctcggcagcagaattaggtttctttagccagctctacgacaagtctatagcctgttaatcaatttcattcttccctactactgtgcaattcgcactccaccactagtatcatgagcctgtatccgggtggaattcatgaaataccaccacccgagtactgctgtttgagacgtatttcttctgcgtaaaaaatgtttttttatctgtttaatgcacttccgcactgtggcaacgaatcacaagtgctagcttgtgtagttttccaataggcaaccaggagcgttgctccgggagggtacataggtcgacgaatagtttcatggacgatgataacggataataattgagtaaatcccaaagttgttttgtttttaatccttaaaaacactaccagcccaactctctagttgattctaacgtgggcatctactgcgtctgcttcgcaacccagcatctgcccgagaatgcgtaattgaacaaatagttgcgcacatcgaagtgtatcgataagaaatgatgtttcagccaaacctttgtgaggctggtaaccagcaagcctcgctcttctttatcgtggtgggttatcaggaaccgaaagtcaccaattgaggttgcctggtctgatgaggctatcggtgacataacaccctggtcagcgtccaatggctgcgtttgcgccagcaacgagagagctatttcattcattttgcaggtaaggtatactgtgctcatttttgtactatgttgtgctaataacgatcagacgagagagctacagtagcggaacgaaggagagacgcatggtgcgctgatcttgaccatttaacttgaggatgttagctaagtggcaataatgatcctcaaatcaaaaacaaaacaaacaaacaattttttaacttgagggcttggggggtaaattgcagaatgaggaatacgctaatgggccaattccgtggaagtgggtgcttcaacgcaggggaaaaagtcttattcaaacgaacgatgctcgtgtcactgtcgagttgagctgattggtttgacgacagacacaaggttgggcatcttcggctaagagtgattgggtattgagcaaattggcatgtaaaaatgcagcctgcacctagacaagtcatgatcgtcctcttcagctaagcttggtcaattatggcgcaaattgatatgccttcagcgaagccatgacgctctcatagtgtgctggagcgtccgtaagtgtttgagtacatgttttggtaaataaaaaacgattagtatcaacctttcgtaaataatgtgcataaatcttagcatttatcgacgggtacccgattccggcagatattagcttaaacattacaagtaagaaagagagacccggtttggtacccgattttggaaagttacaagttttttgccgaggccaagcacaggtcttcgacctgtgcgtttacatgtaagtcgtgtgctaccggatcccgatgcaggcggaaaggggcttcatctcgtggagccttccctcctatatttgaagtgctagctgacaagggcaccaatttttttccgaatcttcgattgttggactggaatatattactacgaagcattcaactagttggtagccaccctatgcaagaacttggatgcccccaattacggattcattctacactagctctgtacatctcgctgcgacgctgtttgattccggtggtgcatgatgtcatgttaagactattgtttggagatctcattgtcggttcaaggttgtatttcctcaaggcactcaattttacggttcaacagtgcgttcgagaatcgtgtgtggcgattgaaacacttgagcactgtttcttatcatgccacggcttgaacgatatgtggcaatcactgtgggcgcgatggagcaaggcgttccacgccgtgttaagctggaggctgctgctttttccacagccacgggacatcaaagcagattggaagcaacaacataaaaccattttgctgctatggagagttgcaacagagcaaccaagcactcaaggtttgatgagctcatttcgccgacattgtcaatacatgttccagcattctgaagagctgaaactggacggtgatgcaataaattcggtgcttcaacgacttgggtttgatgcacccaaaccaattcgaatttggattccgcggccataattgagttgtccaagtagatatcaccgtagctagcgaaacgacatgtccactatctagttaatcagtattcccattcaacgccaaccaacgtcaagccattgccagcaaaattggtgcgtacaattactctttgactccgtctgcctccatcacacaggcgccaccgcgtgtgcgcggtggccaatcagagtccactatataatggctgagacggtctcgagtgccgagaccgtctcggcacttaatgccagagttcaatttgtctactacttcctctgcttgtgtaagcacgtaacgggctgcagttagcccgttacagatgtggtcacggcaggccccgaagggcggcctccccactggatgggatgtggtcacggcaggctcaagtgagcggcctccccactcttagcagtcatcttgcatcgctggtgaggttcacgcgagtccactttgtatgtcttgggcaacttgcgctgtttctgagttgagtcgtcgggtttttgttggtcggcggttgtcttcactgtcgtcgccgttgcgtgtctcgttgctgctgttttcggtgccgttttcgtcgtccgagtccgtgtcatacgtttcgtcgatcgtgttggttgagctcgagtcgctgccttccgtcacgtccggcaaccttcgtgaggtactcgacagccttatccatctcacgtcaggggtcttcggactggattctgacgtgtccaagtaaggacggtcgaagttgtggccaagcgttcttgatgaatacggacagggcgtcctccacagtcgccttgctctcctctccgttgttgactgttgctgctatcacgttcaaacggtgggcaaactcggtgtaagtttcgttcgtacctttcttagtgtcagtgagtgctgtggtgatccacgcggtcaagcggacagcggaacttctcgcgcagtgcagtgcttagttcctcaaacgtcatccgttgcagtgcgtcgaatcgtctcgtgaaccaggttagtgccgtgccctcgaggtgcgaggctgcgaccatcgtcttgatgttgtcaggtcgtaccgtcgaccatttctcccagtcggatctgtatgctcaggcgcctcaaccagtccccggcgccagcgtcgaggaagacctccttcacgtcgcccgagaacatctcgatcttggtctgcttcgtgctgtacttgcttgtgccacgtgcttgggtgcctctgaggccggagcgggggtactgactcatgctttcggggccggcttgagcaagactcttaatcagttgggggaaaataacgttgtgatgtattgaatcaatactattgattggggtatttgagtgtaaggcacgttgaactagggacgtatacgacaacaaatggcccgcgaggtcgtctgtctggatgtgagaccgcgagtaaatgaggcattcccccaggacgaagtggacgagttaaagactcacgacggcgagttcctgcctgtcgtgaaagagaaactccctgcgcaatcgaaggctgcgttgataagtgtcgtcacctgggcgtccagtgtcacaaagccgctaaaccgcctggacgcatacgttttaagcctcatttctgtgttcgcatcgaccccgcagcaacggtcagacgactgtcggtccgagtggtaagactcacttgaaacaccagagtacgcggcgaacctcgcgtaggaacggcatccaggactatataactataagtactatgtaattgacacatactccaacgctagcagtcgtgagcgtctgtcccgttcgaggcgcattttatgaatgtaaattactcgctttatgccccccatcacacccggaaacgagttcagcgagagaaaaaaaaaacaatagagtgagatcatcaagtgcggataattccgccaggaatacgaagcgaggcaacacacaacgaacattgttgtgtaggaatcgacgaaagttgttcaattatatgcatatttcgggccccgtttgctgtttggaactcgggcaaatattattttgatatattcgagggtgcccccacctgcgaatgaacgtagcgatgtacgtgttgctgtccatttgaactagacgccatattcctctggtactgaaagggtaaggaaagtctaggttaaaccaactgtatcaatacatcaagcctataaaagtaatatttttgattagcaccaaaatataccattcttttgtattggcagactgaaacaaaacaaacaccgaggatggaggaggctaacgaggcgacgtgggagttcctgcagccttgggtcgatgcttttcgaagcagggtcactctcaatggaccaaaagccgccaccgcctacgtactgggcagtctggattactggaccttttctcaagacggtttccccgttgccatagacactttcgcgctctacctgagtttccccgccgacgaagcaacccgcacacgagaccgacagttgctgcaaacggtgcgcgaggctctggagcttttcactattatcgctgccgccgataacccggcgattgtccaagttttggccgaatttgtgagcaaagtcaagatcgtagttgatgacgagcgtggaaataagccccacctggtcctcccagactggaagtgctggctagatggccgcctgtcagaatcggatccacttgcaagacaaccgtcgataacgtggggggatctctatggttgcccggaggacccagagacgaattcgttggagtttcgtgctgccaaggagaatagtcgcgactggaggagagataaggcgcgaactgggctttatacagccgactgtgcagtggagagtcattcacgaggctctggggaggcagaaaaggaaaagaaaagcttctaccgcgataacagagggttatgttacgagagctttttggtgtcgacgtacccacggttgttctcatgaacgtgtttggcggcaaaaaatatccgcccgtgagtgagcagacagctgcaccgttactccaaggagcaacggcctcgttgttcgaaacgcaaggcaccatacacagattaaagctcgcggacccaagcattggaatgattacggattcagtggctcggacgagcatgccaaagttcgagcttgtactggacgatcgcgcaaccagccggcgcacaccgaggctcgctatcgaaaacaaaggatttctgtacatcaccgttctttgtgggtcctccttgtgcagattatccggcgctaacatggactttcctgcactggagcacccatctcgagttgggaatgtgggtctatgtgcctacggactctggaattcgctcgatttactctgcaattgcggacgctgggacggtaaaaagactaaagatccgccccgagtgtgatttcctcgttgaagatgtgagcgacgtgtttgaagagccaatgactccggcgcattggtgctggctggcgtatgcgctgtggagtagagcggcaaagccgaatattcgaaagctggatttacaggctataacgttgacggataaagatgtatctgccatcgaaaatgtgctacaaagtagctaccccgatcctgcaacccgaggtagtcatgaaaacgaatcccagcttccacaatatgggtacgtaactgttcaagcgggaactgaagtagtatcggtggactgtgaggatgccgttctcgttatggctagcaattgtcgctgcagagcgctttatgatccttctacgatagtgatcccaggctatgggatatgcaaagcgaagctaatggatggtcataagtcgttcgtggcggatcctccagtgcccccgggagttttctgaacgagaacaggcacttttcgtgatctggattttgattgcgttgacctcgagagcggcgaagtgatgataagactgttctcattcattggcggaaacctgcgatcgatgctacttcgcaacggtgaacagaatgtgaatgaggtggagttaggcgcactggcagtgcttgtccggtgctggaggagctctacatccatgagtttgacgtgcttgttgcctttcagaagaaagtacttctcacgtggccgatcaagcgtttggtgattactggatccaacacggaacccgagccggcgttgtttctgagaagccccgcgagcctaatgtcacgacaactcgccgagttaaaagtatgttgtggtcgagcttacccccgagccgaaagagacaactatgatttctcgccaggttgcgcggaaacgctcaaggaatacgatggaaagtacctgccggtggtaaagggaaaattccccatcgagtcgaacattgcagtgatcagtgttgtgacgacgtgggatgagagagcgcaaactttgcgtcgaagatccgcggcccgctaaatggattctttctattgagcgccggagtgtgctagtgaacagcacaaaatctcagatggagaaagacggaatcaaagactgcctgcacaaattttgctgacagcttggtgttgagctgtcgtactatgtctgaatacagcacttgggtttcgttactatagcgcagaaattcataaactgatttttgtttgagtaaaaaatagcagtgggttatatagtcctggatgccgttcctacccgcgattccccgcatactttggatacgtgcttcaagtgagtcttaccactcagaccgacagtcgacggaccgttgttgcggagtagaggcaaacacaaaaatgaggactaaaatgaatgcgtccaggcggtatatcggcttcatggcactggatgccctcgtggcgacacttacaaacgcagccttcgaccgcgcagggagtttctctttcgtggcaggcaggaactcgccgtcgtgggtctttaactcgtctacttcttcttgggggaatacctcattttgtcgtggactcacatcaagacagacgagctcacgggccattcgtagctgcgggtttctcaaacaccgggccaagtccgacaacaagaccgggctttctaggtagagcgccttgatgggccagcgacacagggactcgctatgggcagatatcacgacattaaatatggcgatagacagttcttggagctctgggcatgcaaccgacagcgcacaaaggtcgatatcaattgcgaaagtggcggcaaagtcttcatgagctctcagtgttaacgaatggaggccacacgtgactagcgacaacagatccatcaatacagcagcactctcaaaagtaacgtactccatgctcaattcaccgcagaaacgttttcgtcggaagtcagccttgccggaagctggggtaaatcggacgccgttgcccggtttcacctcacaaacgccatacccagggacgacaacgtccacccacctaccgttcgtatggacgtagagtgctcggtaacgacacgtacggaaaattagaaaggtactgtcctcgtcgtcatcattaacttcaccaaggtgcagctcggtgccttgttcgatgtctacaaagccgtactcgtagtgccctgtttgagccgattcaagtattggcagaggatacttggtctgaagtaccgcaggaatggccgtaagctcggactttgtcagtgtctcccatataattgagaccgacggtacttgaacgtctgaaactccaccgcacagcgcgtaagctaaccattgccacctcatcacgccttttaaacccagtctgcacacggctagattcgcctcggcggtcacttcagcgactgccgagcagaccgaaacgagcatccggtcacaaacaaacccactggacaagttaagctgccatattccagttgaatcgtatcgggagatatctggctgctgtttgttctgtcgcattacagtcagatcgaccacaaatgagcgtgctcagcaataccccagcatttacaaccttttgtcgcgagttcaccgtgtcaataccaagattcaggctaaagtgtgatgttgatgttcgggccagtgccgctggcaggtcacggatggctggttgactccacctcaacctttgtgcgatcacgacattacacgagctagcagtttcattgcttagtgcattccacgtatcagccaacccacgacttacccagagctgcccaatcggcgggacgtcgatgtcgaatagtccacgaaattgtccccgaagcgataacaacgttggagagagcaacgtgtcggatatctgccggccaattacttctgctgccttcagggcaaacgcccatcgaatcaaaaacgtattctggctgtagcttttgatggagtcttccagacccatagcttctagcttcgcgatggcttcctggaattcacgagaatactcatccgagaaccctagcaaagtaccccaagttgctcgagtctggtctccaccggcataactcgtggaatcgtaaagctggagctcccacttcggaaaccaaaagcagtctgctctgatctttgttgtctgggttgccgtcgatcgagtcgccaactctatgaatgctttattgtccataaacgatagcaccgtaaacagctccatagcttctcgaagctgttgttgcttcgttgcatctggaggaaccttcaagtaaatagtttggtcgattgcgttgttttcctcgaaaaagatcgccactcgtagaactgaccgggcagtgtcgttacttcgttgtatggcattgccacgcagtacagcacgccaaggttccaggaagctccactggaccatattctccacttgtggtattcttgcaacttggcaattcatcaacagacaaatcgaactgctgtgaatgaaaactaacgaatggttacatcgaatcgttcgagtgatgcggtgcgacgtgagagcgattgaccacacagccggtccaagaatcacgacagagaacaagaaaatctccatattatgaatttggggtttgattgtgatcgaaaatgccaagacacgctttaaaaggcgtaagatggtaatcacatctcctcgatctcttctttggggacgttgctgacttccccgtcttctaagcaggggtcgcaagtgcacgagttgcatgtcatcaaaactgctcaattagtgctgcttgcggttggtgggcttgaagtctggtttaaaatagagctccaacctgcgcagggcgaacggatgcatgccggcccgaatctctggtgcagtactcataagtacattaccgttaccttctcggttcatgtttgtgcaacccgcactgatgaccgtcgccgtgcctgtgaattgttccgtaaacagggatccgggtgcagtgcgtgcacggcgaaatgagagttgccaatatgatagatgcatcgaagagagaaaaggagctagcaagtcgtgaaatgaatatcccttgtgaagaattggagggctagtctggcgtctcctttgcatactatgccgctcaccgaggccaattaacaatggcgaaaaaccttttgttggaacgtttggaaaaatgtttgcactttcgtttcaaagaaggttttacaaaaagtttagcgaagtgcagaccgtaatatcgatttgtaatagcacgtccactggcgtatctgcagcgccgtcagtcgatgtgtacaatcgaaaaccgaccagagttccgaatgatttggactgaccgtttctctggtgttgcagcaaacgtgaagattagcttcagcatgttgacatccatgcggcttactgccttcgagccactttcgcttgaccacacgctgattaaggcagcctttgacagccgagggaacttttccttagttacagcaaggaaatctccgtcgtgcgtcgacagttcccctccactttcttcgctgaaattccaatgcgctgggacatcgatggtgaccttaacgagctcccgagccatacggaaggaaggatcgctcaaacacagtcccaaaccactaacgacaccatcgataagcaatgtcttgagcggccacttgcgtaaagcctcgctgtagtcagacaccacgacgcggacatccgacaaagtcagttcctgtaactcagggcacgcagctgctagagcgcttaaatcgacgatatgtagatccgtcccagtgtttccaaaccagagagtgtccagtctccctccgaccagggcgaagagcctaatcaacacctccacactctcaattttggcgacaaagagcttgaaatagtccacatcccgcaagcatgtggcttccggttctgtcggtgcgtctgcaacaaaacgcgcttcgtcattcagattcactttgcaaattccaaggccgggaatgacaacgtccgcatggtcactcatagttgcggagtcgtagcgcgctcggcagcgacagtcgcgagaaagagcaaaagtggtgtcgtcgccatcatccaagccgtaaggctggaactcggttccgtttcggagctcgacgaagccatatcctgaagaatcagggctagtgccgctctctgctagtacaggctcgggaaaacctgtctttagaactgcctccacttcagacaagtcgtccgctgtcagctgaaaggtggtcagatcaatatgctggataaaggggctggctgtggtgctccacaacgcataagctagccacttccactggtcatgatttgatcgatgggtccacgaatcatccccattgacatcttctgcatcttcgtcgtcaaattccacgtacatatgggacgatatgttcctgatagttgatgccgcaagggcggagtagaacccacccagaattcggtcagaagcccacaggtaggacactcggatgtccggaaggcttcctcgtcgcaccatgggctcttcattcccaccaggatactgcgcaatggagcgatcgcagagtagtgtcgtgaacaagcggctggcgttcattgctgcctggccccaaagatgccttccagtaagcctgtcgtcaagtctgatcgtgagcgacgccatgtcagcgcgagcgagcgcttctgtgagttgcacgacggtaagatccgaaaaatccgacttcagtgtcgaaagccgattttccagcgcatgtaatggcacagcaggctcccggtccttccaggcgtctaacagcggggcaatactgcacgcaatgctcgcatgcactgcaggtggcacgaagaagtccattcgtttgcctaattctcgagcgaacatctcgggggtggaagttggctcgctatcaccccacggatttctctggatgccccttatgggcatagcattgggccccgtccgccactccacaacagtgtacgagttccaccagtcgccacttttgccactcatagccgccaagttgcccatcatttcccgaaactcggccgaatactcccacgggtcatcaggaaagcccagcaactcggcccacgagaccgacgactgggtggcaagggggctctcaactggaatacccccgacgagtcgacacttccacatagggcacaccagccgaggtgcgccattattatcgtcgttctcctcctccacagtcatgaacctcgacgcgatctggatgaatgccctattgttcaccatcgccagcatgttgaggatctcgatcgcctcccgcacgcgttgcagccgctctcgattattttcccgattggtggggtccgcggagaagaccaggaaaatcgacccgatggccgcgggttcctcgttttcgtcccactcgccgatccattggaagggccagcacttgaagtcggcgtgtaggcacgggatctggagctcccggaagctcaggctgccgcacagcgcctcgatccacggtaccagcgctacccaatccatcaaaaatctttgaatgaaaaagagagaatcccctttttgtatccattgtacaaaatgctcataatagtatgtcccaaaacagtaaataggaatgacactttttgtgaagaaaataaaattggaggaacaagtttctgtgccgcttttttagtgttagaaattcgaggtcatgcatggaccatgacctcgaatttcttaactttgcttgtgctttttacacgggtggccgaagtggtggatgtaccatagcaacttcaatattcccgagcctactcgctgaatgatagatgctgggacttttacacaagtccgaatgtgttcggatcaacttcagcatacccaaattctggcatcgagcagcatccaactcacacccagcatagagcgggagtccaacgtgaaagtagagccacttcacgacatcgcactgtcccgctttcatggcggccttcatgaccttgatggtgcagctcacacgagtgctcgctcgaagatatcgcagcacacgcagccgtccagtccatgcttagctgccccgattaacgccacttcttggcattgaacagaacgctcttcaaccagccacttcacggtatcaaggtggccgttcacagctgccgccttcacagatacgcttgagcatttagccccaaccgtcgagcacaggtacttcagaatttccaagtggttacccgcggccgcttcgttcgtagcgtcctttgagcaaccctccttgcggtgttcatgcagaaatttgacaacattgaggtgtccatttgctgcagcgcgatccatcgcgcgctaagagcaaacaccgttgccagtgaagtgaagccaggaaaccatttcgagattgccatcagccgctgggatgtcaatatttccccttggataattttcaccactatgcgcgtgcagccacttcaaaatgtccaattgatttttcctcacggctgagttaaccgcgcatggtgtaaacccctcagagcggttggcatagagccattccagcacatgaaaatgaccggaagacgctgctgaatccattgcggacgctttgcacccctctgtcctgttgatatgcagccactgaacaacctccaggtgcccgtttgcagcggctcggtccatagcgtcagatgtgcagccttcttgtcgattcgaatgtagccacttgacaagttccaaatggccatattcggctgcgccatccaccacgtactctgtaaaccgctcgggtttatttgtatgaaaccactgcaccatttcaagatcgccatgaaaagctgctttgagtaaaatccacctccagtcttcaccacactcgtgttcatgcatccatttcacggcttcgaagcagcccacgaccggttggtaaaaattgctgatcttgtacggtgtcgtgcttattgcaaccaagaatttaacagtctcgaggtagcagctgcgctagcggcccacccaattgaagattgattccatttggcgttctccactagccatttaagctgatcgacgtacccctctctggcggcacacgaaagatcgcacacaacttccgggaatgtccgcacaaaccattgaaccacatccatacgtccaagggtcgaggcgttatcaaagagtatcatttccgtccgatggccgttggtgaacactttcgaacctttacaacgatgcagccactgcaacattggaaggtcacaagcctcgagaatggcagacactgattcattgtccagagactcggggtggcgttgatacaattgctccatcgcagctaaagcgtcttgctttggcatcattttagtcgggacgacatgcattgcgagccggtaatgctggagtttctcaaagtggcttagactggagctgtaatctacaaagcgcagtgtcccagtgaacagccggaaagagccttgctcagctgctctgaccaacgcgtaacccgggaacacaaattcatgcagcatttgtacgacgtgacatagcgcctcaacttcggcgtgttcgccggttaccactcgaacacttgccagggtcggctccagctgcattttctttctttctcgtccaaactgaaaatgaatcaagcttacgagtcgagtacttgagtgacatgttttgacaagaccacgtaaccagatagaattaagaaaatcaactttgagtggcagcaaattcaaaaattagccccatcagaatgatctcatgtagcaatacaactgtggggcgcggaactttcacgcatcatccccttgtttgagctgatcgccacatgctcagcaatctcactcaagaacggtacgtgtacatgtagtgtcatgcttgtagcctcccaactttgacaatatcccactctccggttcatccatcgcgcgaagaaactccgatgagtattcgccaggattttttcaagagaactcccctgagttgcaactgctaagcttacgaagcttctgtccccgccaaattgcgctcccacattgggaagacgaggatatgtcgcggaagttgtctgcaatggggtcaacgttccagaaacgctggccggctcaccaccgccacacctccttatcctcaccaatttgttgcagcttccgttcatcgcgtcgactagctgcagcagcggtgaatgacacggattttgagcacctctcgagtaggaacagaggtacgaaggactcgaaccttttcagcgatgacagtattatggacgttcgggtagacgagtttactgcttgaaactctcgggtatcgagactcgcggagaactttcccctttaacgaggcgtgataacgggcgtccttacctttgcaaaattgaagttgctacagtatgtggcacgtaagaaatgaaaagcaggacgtaagaaaaaaatcgaacaaatgagaagaatcggggtaagaaaacaaacaagaacagataaaaccacgctatggtataaagcctccacgagaccacactgctgctttcgttcacagctagacttttgcgacttagtttgtgctgttgttgcggatgtagtagggggcgtccatgaactcatcctcgcagtacgggaagagcgtgtcgtcgtccgagggcgcgaacaggtgctcgccggcgtggatcatgacgtagaagcccgtgaaggcgcagaccacgatcgtgatcatggacgccgccttgtcgaagatggacatggtccgccacgacacgcgcatgtagatgatcagcggcatgagcaggcagctcgtcgtgtgggccgtggcgcccgtgaagtcctgcaggtcgaggaagcgcttgcgggcgagcacggcgatcaccacgaggatggcgatgatggcgatgcgcagcgcgatgtagtgcagcgggttcttcttgtacggcacgttgagctcctcctccgtgatctcctcgccgaactcgagcgccacgcgcaggtgcgacatccggccctcggacttctcgacgaggctggcagcagacacctgacggccgtccacgggcgtcgagctcagcaggtacgactgcttctcctggatctccatgtcgtggtcgacgttggcctggtcgcggtccgggtcgaagcgctcgatctccgggcccttgtgcatgccgaggatgaggcgctcggccatgtagaacggaggcatcatgagcgtcgagaaggcgatggaaatgtgcatctgcatgaacaggtacgccatcaccacggcgccgcggtcagccgtgaagcccagcggggccaggcccagcgggtccgacgtgctcacgatcgagtacaggatgttgcccgacagctggcagccgccggcggtgtaacccgcgagggcgatggccaggaagaagcccgagatgaagaggatggtgatcacaacgacgcggggcatgcgctgcggctgcgagtgctcgcgctgcaggtcgggcaccacgatggcggcaccgtaggcgagcgccaggttaccgaaacacgtgagcacctggtgcaccgtcacgtcgggctccgggatcgagccgtggccgcgcatgttccactgcagaacgacgacggcgatgatgtcggccaccaccgtgcccatgcagccggcgaacgccatgccggcgctctccttgagcgtcgggatcaggcacacgggcacgaccatgatggccatgaagatgatccagaagatctggctgaacgagtccgggaacagcacgtccagcagcgtgctgcccagcaccaggaaggcgcacggcaccagcagacacacgcccatctgcgagacgaccgtgaagaagcgaccgtacttgcccagcgcccactcgcccaggtcaccgtacgtcctgacggacgacggcgccaccagcatcaccttggacagcttgagcgtcgcgtacgtgttggcgaagatcatgaaggccagcgcgatggacgcgaagtacggaccggcgcgcgcgtagttggacggcatggccagcgaaccgatgccgcacacgcagcagaagaggttgaacgacgccttggcgtcctccatcgtgaagaaggcggtcttgccgctaccgccggacgtcatcttgaaatggatcggcgggggaagtgcggcttgcgaggcggtgacgaggtactgcggggctggctggacttctccgggagaaggtgaattcaaaagtgagcgagttacagctccgcgcggctcggctcgcgaaagactgcgtttgttgtccgatccactgccagcttgtctcctgtcggtgcccgagcgacgaactccaacttggtgttcaagcgcggggggcacttcagcggctctggcgcatgtggacgtgcagagcagctacctcggtcgcacaagcgctcgaagttcgagccgacttggctcaagtgccagagattagatgaaagcggggttttgttagctcatgtccctgccatgtgtgcgttgttatagcagcgactcgccaagatacggacaaccacatgaagtcaaagagcgggcacaacacggaagcctccgcagctgaaaatgtcctcattacagtcggggatggcaagtccgcattacgggagcatgaacctgctggccttgtccgtattcacagtgggcgatgggcgctgccgctattccggatgggcttgccgcctcgcatgttaatactgaaggaggaaggatgcgcggcagtagcatgagcgctgggccactcgtcaaccgagacggagcggagctcctcctgctgctcctctcctccccatccccctccctgcagcaattcgcctcagttgcggatcatgcattgcaccggaacttccggtgcactgtcggtcttcagtgaagactcttcaagcatccccctatccggtttgctgcgttctagatgcatcagaaagggtaggaaagctaccccacgagctcatgacgagcagcgcgtagctgccgttcgcagcggcttcgcgcggagatacagtaccggctgctgcacagctttacgtgatattttaataaagttaatcaaatgcgagaaaacgggctgtggtcgtctagagccgggcagcggtgcagcggatccttcctccctacggcccgcgaggttcaagctcgtcacgcggcaggaaacgagatccacacgcatatcccacacggaggctgcagtctctctgcggtttcttgcaaatttggagcgcgttggtgaagatagtatgaagtggagggtgagacgggtgcctcaggctgtccgcagcctgcagtcactcgacaatatggctgcgttcgactggatcaattccagcaccggtatggtagatgacgagcgaagaagacatcccggcgagatttaatcgccgaattacacacgtttacacacaaatgcacggttcggatgtgtcctatctcggccaccaccctttttacgcaggaatatcctttgattgttgcttgacgttctcaatgccttggtgccgtgactcagtggccgtgagattcgagacgctcagttttcgtccactgaggataagcacactggtggcaactcactggaatgctcattgcggctaagaactaaaaatatatattttattttcgtttgttcatcaaagaatccaagcaccaagtttctctcggtggtttgcactcgtgcttcaatgcccgatcttgtttgtttgtggcacttggttgaagttggttcacgtggctacgactgtagtttggagttccacaatccctgcgttcaacttagagctgggattgccgagtgtattcgctgatacccctgcgatagatacacaccggtccacagcacctttatcagctgccgttgagtgctgcacagcattgcacaggaggatcgtacaggtacggtatcctggacaagatacctgttaatgtacggtaatgccaacactctcgttgctgtggcggcaagccggctccataccaatgcaccgctgcgttccctccctatcctggcctgcaatctgcagtgcagacgctacttgtggatcatatccagacctagtccatccgcccgcaaatacatgtagtgctcttgttttgtttcttctcagagcgtgttggtagtgtacatctaccgttagatgtgagcttaccctgcgtcgtttcaccgcgaagaaaccaacgactgtgtcggcttggcctgtatcatcacgcgtcacattgaagtatgtccacaactcaatgtcctctggctcaagacaggtctcgctcaacgtgcaatcgtcttagtgttacaaacacaattgtgcgtgttgagtgacgtagagacgatagcgctattcacgctatccatacgcccaggcggtgtgtggggcctcgcattgagcaggaacaagctaaaaaaacatattttgtgcttcaacgcaatgataaaaattgccaaggctttggttttctacagtttgatcagagaaactatataaatacatgtcagtcgactgagcatccacatgcactgcaaaagtagcgatctgctttcattcagtgtgaatatcttcggttttcccttttgtaagtaccagtagagatcctcgaaaacattcacaacgcggaatttcaattgttcgtgttctcaaaaacagtagatataatgctgcaaaggtaccctggagcgattcgtcaactccctgttagtcccgcttgatttgttttgcgggtggataaacattgttcacctggctgcgactcagtgagggcttgaccgcactgtaggctgagtatccataccagcccccacgctgtggattctgctttgatgtttgttgaagcacgctcttctgcggttgctaacagaacacactacttgtacaatacacgtattacttactcatcagtcagataaaatacaaccaccagaccggtggcaccagtacgcagtcaggtattatacgcgcaccacaagctcatacacgctaagatggagatacatgccgagcatgtaatcggtattcatagtgtgttaattcagaacgctcctggagcggatatcatagtttctgcaagtgacactcaggggtttggccttttttgtgagtaagatgcagcttcgaattcatcattccaacgtctgcatcgctcctccaacctccaaaccaacaacttctattctactccgcgtagccataactgctacagaaaacaaggtaggaatttacagcatggggaagtctaagcaccgccaagaatcaaggcccagaaattcggcatcaaaccatcagaaattcgggaaacaacgcacaccgtggccgttgaggcagtgcctaagacatgcatgtccagacttctatagccagcaattaacgtaagtagaggttttcttcgttgcctgaccaaaagtccaaaaggagtttgtgtaatggtgtagtgtcattggtttggtggtattgccgatgacatcagcgaaactaaggtgggggattctagatcacgactaaaggatgtttgtatatatcaccatggaaaataattctgaatctctcctctttgctcgccttcctgttttcatttcgctgctatcatcgcctgagcttagtccgatagaacaccatcctcattacatctaccggtggtccaatattactcccagttgtaaagaactagaatcctgcagagcgggttgcctcgcttcccttttttatgaagtgatgtagaccgggggatggcaaacaaattgtgacgctaccgcgaaccgaagtactggggtcgagttggttaaaccgacttgtagcatgcgctattcatgaaataatgacaaagcaaacggtaaatcgccgcactcacggagcgatacaagacttccaatacaggacaaaacacagacaaccattttagctgacaccgacgtgcatatctcctgtgtagcttgccgatagttcggcaagtctggtatcaacgaagtccaagatttttttaccctgctgggccccaacggttccacgattcgttactcggccctgcttcattatcaactggtacgggcgcgttggtactacctcaacgttgacgtctggccagaaccggcttgtagactagtttgctccgaagtagagtacaaatgcaactgcttattaacttatcgagatgattgttgtagggatcttccacttggacatcgtaaagggctacggacgtggagactgaaaggaacgattcgtggctctgttggcctgacagaatgtccggggcagtaagtattccgaccacgagagttttatgatattggagctggagacgtaacccctccccagccagttggacgtatccgttgataacaaggatcagccgcccaagactgctttcgttagcatcatcgatggcaataaccccataacacgcttgaataataataataatcacaataatatcatcgttgaggaggttcttacttacatggagaatattttcgagtttgctgcccgagagcgcgctcgttgtgcgatcttgccggtggtacatttagctcacgtgtcaagttgattctacggtatcgatgtatgcgtacggtaggttcatagtcccgtaattaggacgctgtaatggggacgtttttcagctgcggaggcttccgtgttgtgcccgctctttgacttcatgtggttgtccgtatcttggcgagtcgctgctataacaacgcacacatggcagggacatgagctaacaaaaccccgctttcatctaatctctggcacttgagccaagtcggctcgaacttcgagcgcttgtgcgaccgaggtagctgctctgcacgtccacatgcgccagagccgctgaagtgccccccgcgcttgaacaccaagttggagttcgtcgctcgggcaccgacaggagacaagctggcagtggatcggacaacaaacgcagtctttcgcgagccgagccgcgcggagctgtaactcgctcacttttgaattcaccttctcccggagaagtccagccagccccgcagtacctcgtcaccgcctcgcaagccgcacttcccccgccgatccatttcaagatgacgtccggcggtagcggcaagaccgccttcttcacgatggaggacgccaaggcgtcgttcaacctcttctgctgcgtgtgcggcatcggttcgctggccatgccgtccaactacgcgcgcgccggtccgtacttcgcgtccatcgcgctggccttcatgatcttcgccaacacgtacgcgacgctcaagctgtccaaggtgatgctggtggcgccgtcgtccgtcaggacgtacggtgacctgggcgagtgggcgctgggcaagtacggtcgcttcttcacggtcgtctcgcagatgggcgtgtgtctgctggtgccgtgcgccttcctggtgctgggcagcacgctgctggacgtgctgttcccggactcgttcagccagatcttctggatcatcttcatggccatcatggtcgtgcccgtgtgcctgatcccgacgctcaaggagagcgccggcatggcgttcgccggctgcatgggcacggtggtggccgacatcatcgccgtcgtcgttctgcagtggaacatgcgcggccacggctcgatcccggagcccgacgtgacggtgcaccaggtgctcacgtgtttcggtaacctggcgctcgcctacggtgccgccatcgtggtgcccgacctgcagcgcgagcactcgcagccgcagcgcatgccccgcgtcgttgtgatcaccatcctcttcatctcgggcttcttcctggccatcgccctcgcgggttacaccgccggcggctgccagctgtcgggcaacatcctgtactcgatcgtgagcacgtcggacccgctgggcctggccccgctgggcttcacggctgaccgcggcgccgtggtgatggcgtacctgttcatgcagatgcacatttccatcgccttctcgacgctcatgatgcctccgttctacatggccgagcgcctcatcctcggcatgcacaagggcccggagatcgagcgcttcgacccggaccgcgaccaggccaacgtcgaccacgacatggagatccaggagaagcagtcgtacctgctgagctcgacgcccgtggacggccgtcaggtgtctgctgccagcctcgtcgagaagtccgagggccggatgtcgcacctgcgcgtggcgctcgagttcggcgaggagatcacggaggaggagctcaacgtgccgtacaagaagaacccgctgcactacatcgcgctgcgcatcgccatcatcgccatcctcgtggtgatcgccgtgctcgcccgcaagcgcttcctcgacctgcaggacttcacgggcgccacggcccacacgacgagctgcctgctcatgccgctgatcatctacatgcgcgtgtcgtggcggaccatgtccatcttcgacaaggcggcgtccatgatcacgatcgtggtctgcgccttcacgggcttctacgtcatgatccacgccggcgagcacctgttcgcgccctcggacgacgacacgctcttcccgtactgcgaggatgagttcatggacgccccctactacatccgcaacaacagcacaaactaagtcgcaactttagcggcgcgagggtttatgtatcatagagtgggtattcattcatacttttttctgttcaccagaatttgcttattttctgtcatttttttctgactgaaaaatactgatactacgtagtattttttgtttcttacgggaaacattgcaacttcagcttggtgcagcaacatgaactttttggtttactgtatatccacatcgatccaccggctcacctattttggcatcatggagttgatagcgtacagcagcgcgatttggtcgattgtccgtagcgagcatcccgtcgagctcgccttccagcagcagctaccctgttatttgcaataaatccgcgttatttgttgcagtgtagcttgtcaatccggaagtttaggaaatcgtttgaagttgactaagttgcctatcaccttatgttgcaccaaaggtgctaagttgcccaaatcgtttcatcctatgccacggtaccacccttttccaagagcgatggatgggtagacaaaaatatggggtgggtgggtatgggtttttacaaaccctattcccttttatcaattcatttgcaactcaaattcaattcaaagctcagttcatttaactccaggcaccgaccaggcaccgattttcacagattttcaccgattttagaggggtgggtgggttcttaataacccacccaatacccactgatcgaactgtcggggtgggtgggtgggtaaccccgggatatcccaacccacaaaaacccaactaggaaccctggtaccacctgcaattgtcattgcagttcactcactcccccacctccgtagcgatgtcgtggctggacgtcgccaaggacctgaacaccggcaccatcggcggcgtggcgggcatcatcgccgggcaccccctggacaccatcaaggtgcagttgcagaccagtcgcgagactggtagtggcgttctacgcactctacggcgggtcgtgcgctccgagggcgctgcgggactctaccgagggctgctgtcccccattctgtccaatgccccgatcaacgccgtcatcttcggcgtgcagggccaaatggtgcgcgccctccagtcgagggagaaccacagtgagcccttgaccaattctcagcacttcgtggccaggtccgctgccggattggtccaggtcgtcttcgcggcgccgtccgagcacgtcaagatccagctacagacgggggcaatgggggcggagcacagctccattgcagcggccaggacgatcctgaagagatacgggatggctacacttttcaagggctgggaggtgtgtctgctgagggacgtgccgtcattcggcgcctacttctgctgctacgaagcggctaagagagcgctgaccaatgggaacagtgagaacgagacggactggaagctcatgacggctgggggtatcgctgggatgctctcgtgggccatgtgcatgcctgcggacgtcgtcaagagttgcgtgcagggccagagtcttgagggcaagcagatgaccatgaccgagatcgcgagctccaggatgaagcgggaaggaccgggattcttcttcaagggattcggcgcgaccatggtcagagcattcccagtcagcgcagtgacattcctcgtctatgagaagatcatgcagctcacgtcttgaagctcaagctgtggacttggtgcttcttcgtcttgaggaatgcaattttgacgaaatataatccaaaaagtaagtgttcatgtgaccaagtttcaaccagagatgcacgcttaactttttattatcggtttttactgtttcgtctagtatgccgaccgaaaatcgcccgagcggatgttcatgaacttcacagtcgcgtcggggctctctgcgaagacgctctcggggtcaccaccagggttcggacagtcaccgcgcaacgcaccgggaacggacgggtcctgtccggtcttgtagctgtcgagccacgccatattggagccgtagtcgacccagatgctcatcgccagcgtcatgccgccaatcatttgcttgcccatttgagcaaggccgcccacagcgtacgggtggtctccgaagaacgccttcgacgacttgcacatcgtctcggtgatcgaatcggtcccgttcagtgccggccaggtactgcccgggttggctaccacacgggcgccttgcttgtagagacgacgaatctccaccaactctccagtctccgtattgtcctccgtgatgaactgcgtcaccaccgtgaatgcgcgagtggtgtcgatatcgaactcctttccgcgaccgtagagcttcttgttgcccatccggaacggattgaggccacaaccaggcttatcgcaccatcccgagtatcgatttgcctcagtagcgccgcagtcctcgtccgctgagcatcgctgctggccgtcgatcgagcacgggtgggtcgtgtacgacgtggccatgctgttggcctcccaaatgtccatttcagtgcagcaggctccgtacgccttttccatattggcctcaccattgataaacttgacgtccttcatgcactgagcatcacagtaacccgtgccgtaagcagcgcccgcagtgttgatcgggaagcgggaggttcctccgtctgcgtccatcttggagaagtacagagcgtcgttggagccacagggcagcgaggacatatcgacgtcaaaggtgaactcctggttcagcagctggaactgcttgtacttcttccccgatggttccagcatgtagacgtgggtgcccacaccgccgggagtttccagcttcatgttgagagtttgaccggaagtggtgatgctgtgcttgccggcgtagtccgcgccttcgagtccgcagatcttggcgcattccttcggcgtcgagcacgtcgtcgagttccactcgccgttcgcctcgcaggttgttggtcccgaccgcgaccatcttgcgccagttggcgtcgatcactaccgacgactcctcggtcacgcactcgacaacgtccgagtccatgtggtcgacctgggcgagcacgttggtcactttggtacaaacttgcgaggctagggctgggtgcttctccgggatgttagttccaactgtcgcgcactaaattatataatagcacactttccccaccaacaacacccaccactcaatgggcttgttagggttagaacctgaaggcccaggaactttcccttgcaccgggttgatgtttcctctgtgcaccgtgtttccgcttagtcaactgacggaaacccagcgtcaccagccacgagcaaaggctggcacgctctcacacgcaatataaacctcgcaggccctcaggaaggaagggtcccagccagtcacggcttgatacgagggtaccggagctatactccggcgggaaggataaatggagtgcgctctcgctcttccactactcggcgatgactcgcccttcgtatacacggccacttcttcactactcttggcctgaccacgggtaaacgcacgctacgatactagtaggcgcgtccaccgacagtcataatcctaccaacaggtttatccaattgctacgggaactcaccgatagcccggacgtcttccttgagtggttgggaggaaaagctattctattcttgttgcccaaagggcttatctgttctatcttctctttcctatggttcaatacaaatatctagtataaacgcgcccgttttggatcttcccaagtaaccaccaacccttcagagcctcctcgacgccccaagaggcctctcgatgactctattggacgatgaagacttggagcagtcgccggggctcgaacggctgtcttaagtgcggatctcgggtcaaagttcgctgtaaggtcggatcgtacttgaagtcctgggtgtcgaacttgggtgtcgacgagccttcggcaccggtccaaaatggccaatcagcatccgccgaacattgctgaacatgtcccgacgactcgggtcgccactgaagcttggtcgtcagctcgattctcgtttaccgccaaatcactacaccacagctgcccccaccgctatgtgaaccacatgatggcgagtaaccctcgtatgtgctaaagcacgtaggatccgagagtcggcgtccatacgcccaacttctagcacgtccgccaagacatgacatggcgaacgcaaccttcgacaacgggtcgacgatacgtcgagccgcaatggcagtgtcgagttcgacaagccaacggaggataggttcaccctctcttccgacatagttactcacactgagcttgagcgattgtcgtcccggacgacaccgtggtagacgaagcagcatctcgctgctccctcatgatgaatcccagagcaacaccatcttgctctgtcggcgttagcgtacgcagcatcgtagctacagccgcatcaccaatgactgttgacagtcgttggagagcttcccactctgggtccgacaggtggggactgtcagcgcgtgcaacgtgagttgcaggcgtagtggagctttccatggacacctccgtacccatgggaaggttctcagctccgcgttcgtgcggtgacgtacgtcgttggtagcgccgacaggtgactgccagaaatcgccgatgtgtaatgggcctaccttggctcactactacggcttacacgtatgcgcacctgtatgaggaagcgtaggtttcttttacttgagttaagtatactcgagatccacgagtatattttaaacaagataaagactccaagtagcgtgttttggtaaaagatgagaactgctatttgtgttttatgtttctgacttcctctaaatgtaatattctaaactaggaatctgccaacggctggaacagctttgtacatatcgtcgagtaggtgttccctgtgtgcttgcgattcatgccgtacttccacagatacaccgcaaaggccccaagctgctccgcatttttgacgatgtcagtagccgatagccagggcttgtagttcatcactctgcaccaagccgaccattgttcccacgcgcgtgtataatgttgccttgacgattgcgctaaagcccctgctcgcagtagcgcgcccagagacgcgagagatcgcgcaagtctggtgggatccgcacctgtgtccaaccagacgctaagttagaaaattatgctgctagttctggcgactgccacaccctgcttcctgcgtccgccatttgattatccacaccggcaacgtgagaggacgtgatgtagaaaccgtgcttcacttcacagacccccaagatccgcagaagcatttgagcaaaagggttgcggctggtctttttgttgctccaagcgaccgctgacatgttgtcaatccaacagcggacgtgtgtttcctgcaccccggtggcgtctttccatgcagacccccacaccaaagctgcgaatactgcgctcatgagctcacgcacgttgatacaaaatctgttgtcgccgtcctcgttgcactgacgtattaaggcgatctctgagtcgtcaaattgaacttgtatgtactgcttgtagggcgggaacagcgcgcacaggccgtggtcgctggcacccatttggatatggaagtcggactcttggcgacgcgtgaatctggaaagtgggatcgcgtttaatctcccgatgctaatggtcatctcaaaccaccgtaagtcctccttagcctcgtcgggtacctccacatacccaaaccgaggggcgactcgggctagagctgtaacccgctgaaagaatggagtagcttgtcggacgcacgtgactacatggcgaagactccccaaaagcttaagcagtgtggttcgtgttgttttgttacgaccggccacgtctcgcaggcggctgagcgcttttgctaccttctcgggaggtatagacaccgttttagagatcaggttccaatcgaaaccgagagcgcgaccttctttaaaccagccagtgaacttcttctcgttacaggcgtctgggcccagcacaataatcattgccgatcgcagggcgagctccgcttccgctagtcgcgacccaatgtcgggctcgattgccgtgtggtcgtcacaccacgttttggcatcaaaattatgctttcctgttgtgggctgtaaaggccattgggggaaaacacgagtagagatgtgtgatagcggcgccggcaatccaatatgatactggtgagtttgaccagccgaatgggcagcagagatctatgaccaagaccccgagctccggtattgtgcccgtaaaccgcccaacgtgctctgctgccactggaatattcctaaaggctccattcacatcgcccgtcatcatttgctgtagttttggaaaaagcgtgtccacatccagaatgcgattggccaacgcgtctgggccatcgtactgcacatcaaccccatgctcaggcacggtattgtcgttgactgagtcgcccggaggaaacgacagatcgtgaatgatacgagcgtcaagtgtgatatcaacatcactcttttgcacggcgccaaagggactgcaagtaatcccaactagcgccggtagcagctccaagtccagaatcagataccgattctcgtcttgccctttgcgaagatgctttacgatgacatttagagcgcgaacagccgaaccatgatttgctggtggcgcggcttgcactggaaattcagacttccattgaggacgtacaccatgctggacgatactgtaccgctgagatttgtagcgataactatgccacgaaggtacggccgtaggttcgtccagcgctttattaggacgagtgtcccgctccgtttcgccgcgcaatagccgtacaaattcgggtagctgcatgccagatcgtctcggatattcgctgtacactgcttgtttgtttcgatcaagtagatacgacacgcgcccttggtgagaagtttgtgatggcattggctttgggggagataaaccacgctgccgcaaggcgagattgaacgtaacccgagcctcttcgtcgtgtaaggctagcagtctccgacgaatcgtgctggttgtatcaaactgaagttggcgctgtcgaacaaactcggctgccgagggtgctgtggctgatatctcaccatcatgaagctgtagtacagtcttggccaatactttggttccggccggcgacttagcagaggccgagatcattgacatgacttggctgagcggcgaggggttggacgggctcgtcgacttgagtcgaccgagcggcccgacggtggacgagcttggcgacatgagtgcccgatggtggacgagcttggcgacatgagtcgaccgagcggcccgacgatggacaggctcgtcgacaaagatcgatcgagcggtccggtggtttttagacacggaagcatggaccttgcaggtggtgtggtaacgtgggcgcgtatatacttatctcgattcattaacaccagggcacttggggtgcgagtaggttctacattccgtgcccgacaccgtcactgcatatctgcagaaaggcctccataattctgagtaagggagtcacgcacaatttcgggcaaactggcaggcttgaagtggcaaagatgtttgataacacagctgccgttcttcccccggcaaccttgagcagacagaagcctcaggcaaatctgctggttgccttgtttgggcagagcctgccggacctccaacggaatgggaacccgcttgtcagagccgttggctcgtccgccccgcgaatgattaccggaaccgccgcgagtcgactttacggcggcgataacagcctggcgcagaatcatttgatgaaccctgataaaggagtcatgcgatgcacggaaatgggtcttgatatcggcgactgcttgccaattatcttccgcgatagccagccgaaacaattccagctgatcgtcgacccatgctgcgatctcgtccaatgcttgttgggaagacactagttcgctcactctcagctcgctaaggaaatcggaagctgcgttgagtgtctcgtgaaccacgggcttgtagaggagctgagttatcgcacataggacgtcaacagacccgaccagtgtagtaaaatcggcaggagattgcgcaggaggcaggctgttcttcttcgaaaagttgctcatgtagtacgttcgaacacgtttcctcttctcctgctccgtcacgcgaccaaagtgcagaatcgaaagtcctctcgtaccgaaatcccaaccaaatagcgcacgcaggacagcaggatgagggaaaaattcaaactttcgccagtgaatttgaacaaactccacgaatcgctgcgcagtcattgacgcgtacttaccgttgactagccccaggtgaatagccgtctgcatacctgttgcatgaaattgattcttatcagcactaccatcttcgcgtcgcgctaccagaggcctcagcgcttccattgaggaagtgttgcgttgcagagccatcagctgatcaacatcccgagtaacatgagaactgtcacctactccttgtgatgctgcctccaactgaatggaacttggtggaactgcgcgctctcgcacatttagacgccggcgcttcgcttcgcgttgctggttagagctccgaccactcagagcgataggaggctcggtattttcatcgtcgtcggagtcgctcaagccatcgctcaacatgacgtcggtattgggctgacctcttggatcctgctgcgcgttagctttgtcaaagatggtttctccaaacaccgcccccgaccggtgtggccgcccaccgtccttatagtaaacgtagtcgaggatgtgctggattgagacctctgcaatagcgaaatcgccgatatcgaacagagggaggatcttggtctcgtcaagttcatcgctcctaattccatccaaaagctgcgtggcatctctggccgctggttggtcgatcccgttgaacttgttgtatactttgtcatgtatctgcttcatttccccggccataacgaagctcgtgctctgcccggcacacggttggagagcatatatctcaactgcaacatcctgagtggtgctggacacgtatttcaccgaggtctcggtcctgctgagaagttcacattaagcagatcatgctgcgactccgactcccagctatatccgatcactaacccgtagtcccagccagaccctagctgcccccgggcgtactcgtgacgtgcatatcacgccccccacaaaggtgccaactccattcagagcttctctagctgacacagctcttggggtcagttcttcctggagcagctcgactgcctgagcagactcctccgcccagcgcccgctctgcaccagcttgaccttcatcgttgcaccgcgtgtgagagcgccttccaccttgccatacgcgaaacccacgaggttgaacgcgcctgggcgtaggtaaaaatagcttggtgtcctcggagcgggaacggaggtccgagaagtcgtgcgcttggaggtgttagctgcggtgaggaagttcgcgaatgagcagacctgcagcctgctcacttcggagctcctaccgaacctatctattgtatcactgcgacagcgggaaactacgccttcgtcagcaactgatctaacctaaagttactcctgtcgcttctgcaacctacaagagctaaaataccagacgcccgattttgctcaaaaaaacgaatcggcaggacgcccagatgcatttatcaaaattactgaaatgagcactctacctcaagtctctcaaggccgaatctcaccaatgcggctgccgacacagcccaacttactagcttgttcgccgccaccaccccaacttgagatcgaagctcagtagagcaagctttgcgtttgttcctgccgccgacagaagcacccccagcagctatagagttaaacgaagagcccatctttacaccactactcttcttcctttataattttctgtaggtagacccgaaagaacgtatctacagtgaaacaaatattgcagtgtagtctcaggtgctcgacaatagccttcttcgttgcagcagtgtaaaatggtagggcccgcgtcgttttccatctgccttgacctccagacaggcgagggtgacttggtggcgcccgcgccgttgcagaaatgatcgcgcgctgagcggccgagagtgcaaaaattactggcttgaaactggtgtatccctcaacaagtcaagccctgccaatcggaagacacaattgtgattggctaatactatcctgtatcccataggtgggtgtatccctctacaaaacaaattcggtaactcgacatagaatgaatatctaaatctgtctctaaatatcaaatgtgcagaggtcgaaatatgtgtgatttgttcgtttttggtaggcgtccattggaatcactggtctggttaaccccttcgcccatacgagtcaactccgtatacgaagtttttttacaaatagcaagtcaaactacagtaaagacgcataccccgattaagatgatatgttacgtgaatgcgaagcggcaggttgtgtggagtaccccaaatagcagcattcgagcgacctgagccaaaactttgcgtttggtgatcagaatgtagcgatacaaaatttgttagtagtactgggataggcgcatggccttagcgctcaacatcaatcgcgttgcgtcaatagataggcacagtatgacttcattgcttcgcctgtattgcttcgttgttcatctgcccacccacctacaaaagtactttccaggaccggtgccgcagcactaccactaccgctcatctcatctagcctatttcagcacaaaccgaacttactaccgttctaagcctttggcgacgatgtcgaactgaaacagcagctagctacggctgaccgacggtgacgctgacaaaagccgtctgctgacggtatcccccgaggcaacagttctgaactcaccagatcttgcaagctgatgaatgaactgtcatcatgcacaccagtcacagacaccaggctttacgtccgcgtgttggacagtcaagacgtggtaggaagaacgcaatagcgcagcggtgtctataccagcgcaattagcgctcctctagggctgtctataacagtcaataatgctacgttctggtttcatttcgcatcgaggtacgttgttgcctattaacatctttggcattgtacagttgctgctacgttctgacaggtaaatacggctatcaattcaagattgaggaaaaaaatgtgacgctgcatgctactactgtagttttctggaagttgtctcgaatatttcaaatttcagagcttcttcgggccgcacgattttgttttttcctcccctctttttgatacctcgaagtagctatacttataagtattccgggttggtcggccttcgagatcatattgcggataatgcgtggagagaggcccataatcgaacaagtggactctaatgtgaactcgagcttggattgggctgatccagcatgttaccataccgaccaagtccttaaaaatactggatggcaaattattctcaaccaagtttgggatgggaaagaaaaagcctccgtcaacatggtgacggcagcaaccaaggggctactagaagcgggaactgcgcagaagttctcgcctttccgtattcgtccttgagaatggcaacgaggtttcccccccagggaaaaaaacttataactacgtcactgattccatcagctgcaaagaaataagtgcattactttttaacctgcaccgtttcaaggataggttactcttcgtcttggaataaatttctgctgggcaaagtgaaattagagtacaaacgcgtaatgctgctcaggtgtcgcggcgaaagcaaaaaccatacttggatacttgcgttcatgtggcgtctagtcagcgtcgttcgttgcaagtgtctggcgcaagtcgcgtgccttacgatgctgatcatggcgagtttgcttctgagaggaaattagttggcagaaaatcccggtcgtgcgatttcaacttcttcatcgtcgccgtggtagtcttgtccagacgtttatctgttggcaaaaacacctccaaggaagcacagtcgcgagccattcggaaagtcttgtcgctgaaacagacgtccaggccccatacgcgcttagcaggggtgaattttagatccttgatcggctattgacggagcgcatcgttgagacgaggtacctccacgttacagcactcaatacttagctccttcaatttagggcagcagacagccaatgcgctcaggtcgatagtgctcccttttttcaattcgactcatctggatcgaaagttttcgaatgttgcccccaatgcgcgatagaaaacgaggtataaagctctcgttttcgacgtcgatcagttgaagtctcaacgccttcagcctcgtcgagcccgccgtacccaattcacttccgtgacccacctacgtatcagccacgaatgtgttcactccaaccgaaagatctatcttgcgcactccatatccaggaatgaccacgtcagcatagctacccgtcgccagggggtcaaagagtgctcgacaccgccactcacgagagaaatcgagagtagcatcaccacgagctgttggaatcaaagccgttcctggttggacatcaatatatccgtacaccgacgctgcaggagaatgtccatcaacttggtagggataaccgttgcgcatgaccgcatcgacagcagactaatcccgctccgttaagtcaaaccacaatacatcaaactcctcaacggatgtttccgaacatgaactccacagcgagtatgccagccactcccacaccgatagctcagccgcttcgccaagaccaccctcgatgctgattgcgagctttctagtggacgtggcttgagctacagcagacatcgcgcgcgcgaagagctcatttgagtcccagtagggggtgagtttgagcgctcgaatctttccacgtcgctccaccggtgtaagcaccaggtctccaattgccaactcacacagcgagaatccacacaccaacgcggtaaggaagcggtccatgcaacaaatatcgtcccattccttcgcatcttcgcaagaattattttgcaactccacatcaggagacgtcaattctgcctgagccagcgccgaggtgatatccgtgaacgcaggcttcgcaaatgctggtccctcgagtaatgccatgctaacgaaagctgggttctccaccaaccagggacatatgtcgaaacctacaccagcaggtggcaataccccaggaacaacttgatcaaaacttgccgtaatagtcgattgtcgccacgtatcaaccacaacggaccagtcctgtaaagcgctcatctggataacgggaggggcctggaagttgaaaagacgtccgacctgacaggataaggggtccgccaccggtggacttttcatcttcttctgcttgtggactccttgtgttccgtagatgggtgtgacctcattgttcgccccccaatccacagcaacgcacatgttgtgccagctcccagtatctcccagccccatggacttgagcttgagcatcgccgctcggaattcttgagagtaaccgtgggggtcctttggacagccaaacaacgtcccccacgagccagcaggcattttggcgacggggtcgacggggtcaacggttctgacaggtagcacgtccagagcgggcagacgacatttgagcttgtctgctgcttctcatatcgaatcagaaggctgtggaaggcgtcgttgtccacagccgagagcatgtcgaacagctccggaaaataattaattcctgttgttctaccactactaggctgttgctagctcacagcccctacttacctgttggcgaccctgttcaactgttagttttcaacaggttttcaagtttgagaacctgttgatctgaaaacctgttgcgagtgctctttgactgcaaggcaagcacctagcagtcatcaggttagtggcgagtgcaagtacgcaatcggcagggcaaacatctcgtactaacgcttgagggtcgcaatcgaacatcatgccgatagctgggactgagagcgtacaagatacaccaaattaagtcagctacaagcaaccggaagtcatttagagagctgcagctcaagaatacagcgccaccacgatactgtaatctctggactaacccactgtccttgcgcatccgaacgaaccacgatcaggctctcggctattagtagagtccctcacggaggtaaacttcgagtcgcgcatgtacccctcgcaatatcataatatactctttgacaaaggttattaacagacgacagccgagcagggctaacgacaggtggacaggggctggagagacacaacagccgaagagtgctaaagtaacaggtgataaatatcacccaacagctccagagcctctcggatcctttgggcgcatatttgacgcctgcgactggcttcgtcgaccggaaatttcacgcggaagtggtgtaggtagatgtggtagggctcttcgagcatgtacatgtactggtctttgtcgacgcagcaccagaatgaggcgacggtgtagcggccggtcttgtccagatccagcgacggcgtcaggtgctcgcgcagcagctccacccacggctgcaggaaggctcacttgtgctggaacttccacttgcccatgttcgacggctttttgcgaaatggcgagcttcttgcagttgattggcttgaagtgggcttagcgttacttcagcattctaaaaaataatcgtgattttgaaataattattttaaacgtttaaaacgttaaatataggtaatgtgaaagagttttgtagaataccgacaagaattatcaccaaaaaggttgacatagattttctctttttttatagtaatgcgtcattacgctgaagtaacgcaaaccttctggggcctcgactcgaggttcacgcacgacccattccagcttttacctagtggggctcacatcgtacaacagcaaaatcgtccatccattcctccatggcaaccggcatcaagcgcaaagcgagtgacgacggcaattccgcaacaagcagcagcaagcgacgctcggcttccttgaccaacgtcgacgacaagaggacgctggtgtgcgccgtcgaggggctcaacggtcgagtctgcatcatccccatcagtgccgacgcccccatccaccgcctcaaagagctcatccaccagcagaatgcgcctcaactgaccggcatcacggcctccactatggacgtctactccaccaaggacccccgtcacggttgggcgcgtgtgagtgaccacggatccatgatcagtcgtggggaatcccgagccaagacctccatgctcccgacgaggcgtattcgcgactacttcccgtccgacacccctcccttccactcaggtgtagtgcacgtcgtcgctgaggcgatcaccgacgacctggttgcccctcaagtggaggcggctgaaccagcgccagcaccggatgacgaggaagtctcaagtgatgaagaggactccgaggcggagaatgaacggtacgagcaagtgcgagacgagctggggctttcgctgagctgggctattccagtcaaggacttttcgcagaggcacgacttccaggggtttcaatggctgcagtaccagagatacctcgacgttgccccctcccgcgtcttcatcggcaataagaccacttggcgcgagttttacgtcgcatgcaaccaggtgatcgagctcaacgaaggccacgtcatgttccgctgcgtggagggcttcaccgcgagcaaagatggctccacgctgatgttgtgggtagggacttaaagtgaagaagaaacagcaggaagcagaaagtagtgctaccatctgttatacgaagtcctcaaatgttttattactcttatatttgtttatttttcatacaattgtcaaaaacttggatgccttttgacactgtcaaaaaaaatggcaggtgttggaggccaggattatagtaatggacacgtccatgacgatgtacaggattaatcctgaacgagcgattcctaactaaagtgagtaccatctgaggaagattggagaagatacgttgaggacgcggaagatacccttcgtgtggttctcctttctttgcagaattactgcaagagaaatcatgggcaaatactggtttgatacttggaaaatagagtgactaccgtcatcccaatcgttacgtctcaatgagcagagctctaaggaagctggagcaaagcttagatgtattaattgtggcgatagtgctaagctttgagaaacctctagggcacgtggtcatggcactagcttttgcgcgagctctgacggctgaagttcctcgtcatcgatgtaggcatgttcggacggtgggggtatcttttcctcggtgtcgtcgtgttcaatgcgatccggtatcattaaatcctgcagaggtagaagttgaccggatagcaaatagtagaacaactcgaatcggcgtcttgtcagagaggtgttgctcatgtccagttgtctcccaccgacgacctggtggataaacatccagcagacgtatacaccacagctaaacgtgtcaaattggattggcctacactgagcgaggacagtgtaatcttgcaggcctcgaattttcagctgcgtggcaacagccttcgctgtattcatgaaggaaacttggttcagcggatcgtagtaagtatacacttctccgtcaccttgataatcacacagcaccagtgtgcctacggaaaattcaacggcagcagcacgacgtctaccccaaatgcatggatttgctgtagaacacactcgtggatcgaaacatcgattaggtccgcgtcactgcgtctcgtgcgagttttgcttggaatagctgactgaaatccagcaaatctgcaagtaggaaagtcatcctgtagtcgatggcataacgtcgcgattgatgcatcactaagccacatgggtggtgtcgctctgtaaagcatagcgtattcaaagtcaggaagattggggaggccgtcgatttgcttgcgcgggtacgcagataacacgtcagctgcaactttgatcgccaaggcgtgatatttagcaggcaatgagggcagtccctttccgatgagcctccactccgagttgcaccgattccttcagatcttgaactttcttgaacgtctcgatctgcatgcgtgaaaaattcccgacgtctttgatctgaaccgtatcaataaagccgtctccgttttccttgctacgaggtttggtgtcagtttccaagctaacgttcacggctatggcggtgtctttagtgttagagagagggagcacctttaaacaggattctaccagctttgaggggagaatgtagacgcgtcgatgatgagtacgggatttttcatgcgtttgaatttcggtttcttggtagccgcctcgctgtacttgacaatgatcccggacagacgccgctgagtttctacaagagttgggcgctcacgatccagcgcagacagcaaccccactaatgtaacttctcctgcacacttacgccccgcttcagcggcttcgaaccattttcgatcacctttctcaccagcagccgttgtggatttcagttttcgtggcgcccctaccttcctggcctagggattcagtcgtacgtgcacagagctaaatccagtcacatcacaactcgatgacctattctccacttctagacactgatcggattcttcgcttgaactaatttcgaattcgcgtttggcttccgcatcctcatctattgcgttttggtggtggtgaacgtgaggactggaaaccgcatcgacgcacaattgctcgaaatcggcgattttacgctggcgtccgttgcgccattggtttagcacgaactgcagcatctccataaactcgctttcatcatcaatatctgccatctcagttgcgatcagatgtgtggccctcacagcctctctgtagcgctccgcgtgcgtcttcactctttgctcgcggcgacccgagttggcatcttgggacttctcataggagaactgtctgaccttctccagtttccggtctgagttcgtccacctgcaagtgcaattggctgatgagtttttaggatatactattatcgtgatgtcagtctgatcgtacctcttgtcgatacggctccagggaattagcgggacagctaaattttcgctcttgcgatacgcaatagcgtggcgacacggaaggcgtattgataacgagaacccacaatcacatctccagtcgtccgttctaagcctatactcagaagaggtgccgtacacgacgactagactcgggtcgccgtgatctttacgaaacgtgtaatttgaaacattgtccattgcacgagcgtactgctgttcaatctgcttggctacatcgtgggtagtaaagcgaagcacattggacatctcttcgtcatagttgctgttcacgaactggccaattcgagatagccgatactgatattcgttctgcattcgacgctcatacgcgaccaaagctttcacgcacatagccatactcagggagctgtctactccatccttgaactttccaaaaaagctttcaaggcgattattggtgtggttgttaaagtgtggcagatctgcgcggcgatacatcacccaacgatcttggcacgaatcccaatttttctcgaagtactcgaaaacccccgtcagaccgattctttcacacaagcccttcagtgttttgtgcgtagccttgtagtcttcttccgaagcagcatacaccattttgtggattgctgcgtcgacttggctcgcgtcgtcagaagaaatcttcccaaaatcagatttcgatcgcatttccttcagatacttgataacatggaagtgatgcgagcctctgggaagtgagcttcaaggacacgaatttcgttcagatctttgacgacaactacaacgcgcaccaaattaatccgagtcggatgggctctcttaaagtgggcgatagctttctccatgtgccaatctcccttcgcctcgagcagcgactgctgcaccacagcgccttcgccgaactcgttcatggccatgaaagtaaggagctggtagttatagctaagacgtcaatggcaggtaagacacgttataaatcattattacatagtctcagtagagagacaaatccacgcaccgattcgtttggtggctgcaatcaactagcagcacttcgctaaatcggccatatacacggcgcatgtgtgcactcaccagcgatatgacacccgtttcacctgcatcagtatctgcaatagatgcaacgttctctggatcagctgctgcgaaagtcgcgacttctctcgcggtagcttcgttatcgtcaacacttgacaccgacgatttatgctcacgcaccatgttatccacatcaacttggatgacattctgatcgtgttccagaagatagtcgtagattcgagcgcgttttgcacctacggccaacataccttccacacgtgcttctacaagtggattgtcaactccacgagaagtcggatacgtcgcgtaggcagcagtcgataccgggtgattgtgggtaatgcatccaagctttacttgcagctcgccccttgacaaattccactgtaccacgaatctaaacgggcaattcgtcaaccgtatatgctactttggacgactaccttcactgcgtgacttcctctttttccaaccgtgggtgcaaatgtaagtccgctgatacgggtcaaacgcctcggggagcaacagggagtcatcgtttcctttcatacagacttcttttcctttcttagtacactttaagcgcttgatacactctgcacgagacagggtctctttcacgggcaacacttgcttggtgcgctcgcagtactcagccaaatagatcttccatgcagcccagtctgtgtgccagagcaaaggaggctccacgcttacagagattgccgcactgtcgtccccgccgtgttcttcgtggccatcaccatcgcggctagacgcacaccccactagcaggcccccagtagcccccgcagcatcgtactcatcatcgccatcactgcccacagagttacccatgatcgcagcttgctctttgtcgtgctctctcttctcctcacgcccttctccgtcgtcgagcgtgctcttggtcgcgtctgaagttggcgtcatgcagagccccggaccccggtgagcgtcgttgctctcgccttccagtatcctgtttcgcttcaccttggccttcgcagtaggcctcactgccttggccgcttccgcgtgcgttgctcggcatcttcacgggaaaccttcgattgggaaacgccgactcctcagaacgagaatcaatcgcattcgcctcctccgcgagcgtcgcaagtgctaaattggtcgcgctgtttctccctcactcggtaagaaatgtttcttaccaatcctggacaaatcatgttttccgatcatgtacgtttccatgattataatcatggcctccaacggcgccgaaaaaaattgcgtgatggacatcaagtgggcgttcctggtgccgtggtgcgaggtgttcgccgagtgcaaggctatctccgaggtggtggacacgtccaaggctcccgtgaccgcgtcgctgcgctgctggcagcctctgccccccccccccgcgcgcgagtcgctggcgggaagatgcatgatccccgtcccgttctgggccgagacgggctcccgctatgaccgcaaaagattgcaacgcgcgcgggaggccgtcgagctgttcaacatgctggcgatggtggatcgcgtcactttccttagttccagttcgaacacggctgagggacggggtcaatacttgattagttagcgagacttggttgctgcgcccaaattaatctttcagttctactctagtaattcgagtaaacttgacccctgaggaacagtctattacccgctgggagaaccgaagttgtgagggctttcacccaacccatattaggaaaaaatactaatccccattctggcgcaagcccactgtgtgagaagagaagaaaaaaattgtcgggcctggccccttcttcttgctcacgcggactcgagtcctgcttgttcgcgttctggcggagaaaccacaaatgccgtggtttctttctgcaagtcggaaacagctcctggcctacaggccggctcgctgaaccgtacacttttctggaatttctgtgggagtttgtgaccgtagtcgacagcatcgaagaactattcaccgacgacctgaagtttgtcaaacctatttgggagtgcgttttggtgggcaaattgtcgaaattcgacccggtggcgacgcaggcgaaagtgacgtgggggcagctcttgggctgtcaaaataacccgatgcagtattccgacgagttccgagcggccatgggcaagttggaggcgatgagacgtcaagtcgctgagattttgggggaacgcatgggaattctggaataaggaggggagccagggacttcgttgtggtggtgcgttgaacatgatgttgctgatgtgtctgtggcctttgagctggagaacggcaacaaatcgaagatttctcgtcggctgggaaagttatttgatgcggaggttccccgggtcgttcagctgtgcgcagtcagcgaagaagcagccgatgtggtcgagaagttggaggggtctcgttcgtgtgtgggaagtggagcgataagcaacgtggagttttcgagcccggatatcccgctactgacgaaggctgtggctcgctcgaactactcgtcgcttcgtctgggacttgatgaaaagtcaaaaggggctgctgcgatgcacagtgccggtctgatgtttaactctctcattcgtgggaaatcgctgtgcaagttggagaaagaaagataagttggatgctccctcggaatctaccggtaaaattaacgaacttatagtgcagtgtcttggggattcgggtgtccgtgtaagtggggtttgctccgcgctcgctgaggcgaagtccattcacaagttgacgcttcaaatcggtacgctctgggacgacaacgacgggatgaaccaagtgcggcgtgtatgcattgtggagtaaggcgtcgaacacctcgattgatattgtgacgatatcgggtatcaatctgacgggttggtgttccgattgcagacagaaggacagagcagatgggtgaaagtagtcatttgtccagtctcacttcaacgtggaaggcatctaatgttggaggaggatccagaatcagcgacggacaggctacgggtgcaagtggcacccaccgggaggcgtgatacgtctccatgcatggcaacaaggagctacagcaggctaggcgacatccaggagagcagactttccaacaacaggagctacaacaagctacagcaggctgggcgacatccgggagggcagacttgccaaaggtaagagctaggaggcgctggaaggatgggcgacatcgtagctagctgctaagccccaatatatgtttcgcactttgcaatctacttcgagctgcgcaagacgaagtttcgggctgtgcaagcctggggtgcagatcagttgggtcgctgatgcggcgtatggggcgatcaaggaaaactacccaccagggattatcgggcaggctggtcaggacgagtcgcgggctggggtattcggatatgtagatgtgcaagcaggaacaagaatccagcctttggtgtgcagcgagagcgatagtctcgtgttggctcgagattgccgctgtcgagctcgtacgattctgcttcaatggggaagcaagcggacctcgttgtgccaggctatggactttgcatggtggcgattgatgatggtgtcaatgagttcatacaagatcctccgggtgtcaatgagtttatacaagatcctccggccccgaagtcaggctggaagtcttcagggaaggtccgcgcgcttgagttccatttcgactaggtcgaagacgatgaagtgctgtacgaaatctttgatggaatgggtgctgggcttcggacattgaccatggagatgcactggagtgataagcatccgtgcgtgctattctatcgcatggtcctaagttgccctaagctggaggagctgcacctcaaaggattcgatatcgcacttaccgatatggaggaggtcaacggaagataaggaggcttctgctggtacggacataggaagtcgttagctagcctaagtgacatcaatgtacctcactgagaaacgaaacgatatggaggaggaggaggaggacatatccgagtggggggtcaagaagttggttctcgaggacgttagagatgtggacggcctgttggagactctaagcgaccccaatgttcggatggctcgggagttggttgagctgagactcacgttgaccaatgactcaatggtttcgccggaatatatcgctgcgctcgaatcacaagacgggaagttcctgcctgtggtcaagcagaagctccctacccgctcgaaactcgcgatgatcagtgtcgctaaaagcgacgacgatgcggaagacaagaacaaggcgactcatcagctggatgaaagcattctgaggttggtgtttgccttcgcagcaatcccagcgcggcgatctgttcgtgtctccagaaaggctggtggtaaacatacccagaatggaatcattcataataactgccccgaaactgaattccctgtttgtaaggcaaggactaacgttattaactaacgttattacagcacggggaatccacatagcttggtccaacaccgtcgcggaggacaaaccaaccatcacaagagctcggagcacccgcgtgagaatggtggagctaccagcagcaacgccagtgatacagaggccgaggaaagagcgccatcatttgcgtccaaactcaacgtgttccttggggccaagagcggcgtcaacaccaagctcggcggcatattcaaggatcgtaccatgcacgcggtaggagaactacccaacagggactatcggacagggcgatgatgactcgcgcgctggggcagtcggatacgtcgatgtgcaagatggagcaagaaatccagcctttggtgtgcaacgagagtgatagcctcgtattggctccgaattatcactgtcgatacgactcggcttcaacgcagaaacaagcggaagtcgttgtcccaggctatggactctccagcggtaatgcttactccaatacaatccaccgcttttcgaaatcgagatctgaagagacgtatccatgaacttcaatcagcattccctacacttttatctacttttagtatctacaggttcgcgcaccaacgctggccgtctttcgagtataagttgcacaagttgagggcaaccggagaagtacgccatcgacaacaccacgagtcttccaaatccacatcagcgccagcgtccagcaacactcgaaggggctctagtcggttgtacatcgccgccatcagcgacgcagtcgctccagaatgggattgaatgtccatgcccgccccgttgttgacaagaagctggacaacagcgtcgtgtccattctccgccgcgatgaagagcgctggggtaccatcgtcatactgctcatcaagcgacgccccaccattaatcagtactcgcgttgcgtcaacgtggccaaactcggctgcaattcgcaatgcggttgcttgttgggggcctttagcaccgatggaggccccatgcttcaacagtaaacgtatgacgtcgctgtgaccgtgtagcgcagcattcatgagcggagtccatccagctttatccggtctgttgacatccgccccagccagaagaagagcttcgacaactttgacgattccatgttcacaagccatgcctaacgctgtagcgccgtcgttttgagggataccaacgcaggcatcgtgctgtacaagaagcaccacaacctctgtgtggccgtttgctgctgcaattgcgattggggtgtatccgtcgtcggcaggaagatcgatgtcggcgccggccttgagtaatgctgcgaccactggaaggtgacccattgtagccgccactttcagcaccgatgaacctgctagcgtccttgcattcacttgagcaccgtaccttagtagcaactccacgatgtcgagatggccatgcagcgccgctagatggaggatagtgagcccggctgtatccgttgcttctacgtcagcgccagcgtcgagtagcagtcgaatgtcatcaatattgtctccacgcgctaaaacatcgatgaggttgatgtcagagttcgccttggacgtacaaatactacgaagcacgaagcccttgacggtaaaaactgcttgaagcagtcggtgcccgaatgctgtacaggtgctagtgagcccacggttagagctttgtggctgcatattcgattgtggtggggtttctgtgaaatcggcgagccataggttgaactaattaaaagaaaaaagaaaagtaaatccagtgtgtaacgcgttccgcttaagaaaataacttgaacactgtgatagggaagctggcacttcctaaagtgttgatcgccgagtagattcaaaagtggggaatcatagcatgcttgccccagcgctcatgcctgtcagtgtctacttctagatttctgctcttctacggattgttatcttctacagatagttctccccaactcctagttgactcttcacgtagtccatgccagctggggtaatgcactgcaagaccccaatgtgtgtgagcatggcttgaataaccacctcacactacaatcccctcccaagccatgttcactcaaaagctctctgggaagtctcttaggttgcactgccaccatagagatataagctaacatgcggccaactgaccacagttcatgccaacaaagtatcttgtttagcttgcataactatatacaacgtcaacgacttaagcacctacgtggttacttagtctcagacatgactctagcacacactgtgtagtctagtcgcgatgctatccagcagctcggctgctagtgcactgcactgccgccaaatcacgctttcagcaaattgtagtacgtcgtgagcttttcatcctttgctctatcgacgtaggcgtcaactaacacctttacgtcttgatgcatgaccttcaaaggctcccaggagtcctcaatagcctcaagaccttcccagctgatggccagctgatagtcgtgcatgtcttcattccaacggtgctggtgaatagcctccacctttagcacgatgccctgggctgcgatatgctcacgcagctcttcagtcacctccagatcgcactctgcgaagaacttcaaccgggaggcatgcacgttgctctccctcccggtgacgagatgcttgactgtgaacgaatgggcgttgcacttcgtcacgacgtaagggccgacccacgtcacgaggagtttgttctggttcttttcatctacgcgagatctcagcacatagtctccgatagaaaagttcaccatctgatagccttcggcacgtttcttgttcaacaacgtccgccgttcacgttggtctgtcacctcttgatgcatcttctcaatgctgctcctcaatgctgccaaagactcctccatggtctgcatcgaggtgtccacactgataggagcataaccagggacgaaaatggtcgatatcggacttgggcatggcagccctgtgaagacttcaataggagctcttcctgccagcgacggcaccggtgagtgattgagattagcttggacgagcgggattagatgaacctagtcttggtatgagagtgagtactatagtatcattgctcgcagcacctgcaaaacatcgcggttcacgcgctctacagagccgttcaaccacgggctgtatgccacgacgaactcctgcttcgccttcatgaacttgctaagtagagccaacacctggttcttgaaatgcgtagcgttgtcactgacccatgttttgggcattccgtagcgactgtgccccacatcattgcctctgcagctgctggaccgatcgacgcatcgcaaggtatgagctcacaaaaatggctgaagttgtctttgataatcagcaggtacttgcttgttccgaaactctcccctagaaaaagaaaatcccagttgatagctccattgcgaacgtccgagcgaaaacaaggtccccatggacgtggtataactcctccaccctttacatgatggcagagcaggcagctcttcaggaaccgccgagccctttgcgccatctccttgaatttaaagattcgcttgatatggtttagcatcactgcctcacctcgatgaccttgaggaccgcagtgtgacacgataaccagtctctggatgaggccacttgctccttccggcacccagatcttgccgtcggatcggtacactccatcgtcgccttgcgtgcaggcctctggtctgtcttgtagatgagctttttgcgtggcggcaatctcgtttagtgttggccagacgaacgagtctttgtcaagtggtctcaacaatggtcgtttttctgcctgcgtctgcatgcgcgtcactcgcttgaacctcatcactgatgtaggcggcgcaccaccccagcgagaaactaaatcagcccagacgttctgctcaccctctatatgtgcgatagtgtagcgatactcgtcaatttgagtgaccatcgaagcaatttccctcgtacatgcttcttcgtttccgggtgtggtacaaacatgtaaatcaaattgcgatggtcgcaaaagattttaaagcccccaggccgcagcaacaggtagtttaagtcgtcacacgctgaaacaattctttctccgcgaccgaccagtgtagctgcgcgcctgtaaaggtccctcctttgcagatcaaaagctcgtggttttgctcagtcacacgctttgcgtcatcccagctctccacttgagtcaaaatggccgaccatccaacatccgacgcatcacaaactaatgcgaaggttgcgctgtctttcggatgggctagcgttgatgagttcgccaacagcttctttacattgtcgaaactcacgagctccgactcgttcagctgcagcgcaataccaaccgcgactcgcttggtctttcgttttccctcgagcgctcgatccaagcattgctgtagtggctgtatagttcgggcgtagtcgatcaaactatcgcgcatccaattagatgcacagataaattgctgtagttcacctgccgtggacggtggaggcatgttcgacagagcattgatccgtctgggatcatgcgtgatgccgttctctgaaattactttgccgcaccaggtcactgactgctggtacaaacaagtcttcattacactgaacttcaacccatagtgatccatagtgtcaaacaaagtctccagtgccgccagatattcctcgatggtgtctgcaaacaggagcagatcatcaatccagatcagcagagacttgtagaccagctcagcaaagcatttctccattgtagcctgaaaatgcaaggccgcatcgcaactaccctgaggtactcgagttggtgtgaagacgccctcgtcggtcgcgcaggatagcatctcttgactcgactcagccagcggtagttgccaaaatctcttaatgaaatcgaaaagtccatagtgcttcttgtgcctggcatgttgcagctttgcatcgagatttggcatgactccggcgataggctcagtcaaagcgttcaaaggcttgtagtcgcttgtctgtcgaaaatcctccgttcccggctttctcactggtagcgcaggacacgcccatcgactggcctggttccggtatacccaacccagcttcacaagcttgtcgttgaactctctcatgaacttgctttgggctggtgagtatttccttggcttacatctgtacggctttgcacccttcttcaatcgaatctcgtaagccggtagggtcattccggagatcgatgcgccaaatgtcgtgtttcctcactaattcttccaagtgatgccgatatgctacggggaaacccgcttttaccgcatcgtcaaccaatttgatcaactgctccatgatctctgccagatctggatgctcagttcttttatcgtcaacgctgtcgtatggatcacagtcgtcgttgacttgaggttgtgcaagttgctccagcaacctgtccacatcaattcccaatgacttcaacaagtccttacccacgataaattcatcatcatcatcttcaattagcagacactcgacaggtttctggtgttcaacgatgccagcctgtgccaatttggatgaccaggtctacagctttcacagcctcgacccaatgccccccaactgcacggcccttgatcggtttttcccgtttccttatcgagatctctttccccattactgcgttgagctctgctagcgtcttgacgttgatgagacaccggctcgacccagtatctgcgcagtaaggctttcggaggacaccattcagcagaacggtgcccgccttatttcagttttcctcgcgaagtcgcttcatgttcacatcgctggacgctttgtccttgttcttgtagaactgcttcggcaagtctcgcttctcagcgtcactggcttcagggcacttagaaagccaatgaggtcctccgcattttaggcatcctttcttcggtgcggtagcagtaggttttccttttgcctccggacgtggttgatttcgcgcaggagcaccttctttcttgcgcgagtcatggtttttcgctgtccgtgcacgccagactcggctctgagcttggccttctttccgccgcgctcgtgtgtctgacgtggcgtttgaacatcatccgaggccctcttcttctttgatcgccgaaagtctcggttctgctcaagtgccttggccagtatcacatcgtgcaacttgcactcatccgtcttggctccaggcgattggtaccgcaaggcgtttttcacctcctccttcaatccttccggggtaatcgagttgaccagcaaactgcatttttctttccgcccggtttccgactcaaaacaggcatgcaggccgtgttcttcaattatgcgctcgcaggagatgaaatattgcagcactcgctcgctaacgtcactctccttcaggttgaaatgcaactgtttcttgaacagagcttgcacgtcgggcagagtgtggttcttcacggagttgataatgttgtcgatctcgctacgcagtctgtcgtcatcgacttcagtcactgcaacttgccaccggagccgacgccatgtctctagcagcttccgatcgaaagaatccttcacggatctcgtcaccgcagcgtagtcctctcccgaggtctggcagcgcgctctcatgatgtcttcatagaccttccgttccttgcgccactggacaagggcggcgtgcgaggtcgacgtgatttcaggggccagcaccggcgtgaagattgggtgagcaccatcgtactctcgttccttcatcgggatcttctccttgctgggtcctggctccatcttcttcagtgaaacgaatcccactaaagtcgactttgtaacgcgttccgcttaagaaaataacttgaacactgtgatagggaagctggcacttcctaaagtgttgatcgccgagtagattcaaaagtggggaatcatagcatgcttgccccagcgctcatgcctgtcagtgtctacttctagatttctgctcttctacggattgttctcttctacagatagttctccccaactcctagttgactcttcacgtagtccatgccagctggggtaatgcactgcaagaccccaatgtgtgtgagcatggcttgaataaccacctcacactacatgtggctgtacatatcgtcgggggttaacgttgcactccgcgctagctctgacaatacaggttacttttgcgcggttggtcagcctaaggttcagcataaatttctggagattaatctacaaaagttcagttccataccagaccttactcaggacaggctaactcataaattaaaaaatggtttgcacccgattaactactggtgaggaccttgcaagacgtttgggtctgactgaacactggtcctttccgtgggtatttatcagctcacttgtaggttgcacaagaaataccaatagcaatcgaccagtgcctgagggtcacccatcggcacgttcacttatcatttctcctcgctgcccgcatgtaaggttctggttgtgcttgttgtgttgcgagtaaaatggaaactgaattgatgtctttgtctgtttgctgctatccatctacccgagggcgccctcatggcgctcggtcctaaacatgaagtggttggctgaggcgtgccggagcaggagcttgcgcaaccggtgagtatgcagacgacgacttgggctctctgcgtgcggactcaactgatgacgtggttgtgttctgttcttgcacatgcagatcattacaccgcacccgactcgcccagtccagctcaatatggtgtatcaacctgcacgaagtaccacgtacaacttcgctgtcaaccgagggcttacacgcgccaactaccagacggtgagcaccgaaacataccgccccagcaccgtgtacgaaagaccttacaaaactccgatgaacttcgcgttcgttgaggcatcgcgtcggcagaaacgacccacaacgaaggcaccgcgcacgacttcccactttgttgctgacaagaacgacaccgccaccgccaccgctagcgagagctcacgcgatttcagctttacaacggccggcttcgacgatgacgcgtatcccacgatgatttcgtatcctgtggccccagaagactattgtgattgcatcacaatccccgacgacaccgactttgccgtggatatctgcacggacgacgtgaagtggggggcgagtactcggacggcacttgtaacgaggtgcagttcagtatcgacacgatgtacgagagttgcaccccagcggactctgttgaagacctcgactggtacgcttactgcgcaatcgacttcgactattcactggaagacacgtcttcgtctagtgtcgagtcaagtgcagaggacactttccagagctcctgccggctcagatgaagccattgcctcgatatcaagtgttgatcagtcaatgactattacgtctggggagggctcggcgtcggaggaagaaacgataacagaccaggaccagggtgcgtcctcgagcccaccgcggtcgaagaatcggctccagctgcgtccgcagctcaagcgtctgcagccaacacgcagcgatcgattcttgagcgaatgctaacactcgctttggtgctggctctctcgcttcagtagatggtcttcgtagtcggtggcattcatgtttagaacatatatcgacgtatattgaagtgagtgtgtgtgattttctttctttcttaacacacaatgggtattttgagaggagacgaaggcgaggctgaaaatgggttttccccgccgaacggctccgtatggatgcggcatccggcgggggttttcccacgctaggtaggatagttagtggagcagcgccattcgtgttcttgaggcgtgaccatcaagtgccggctccgtcaacgacatcatcgccgcggtcacgcgctcgacccacctcaccgctccctgggctggcttctccagccccagtttcggaccgacgccgcgaccgaagcttcacgttgcgacgatcctcgactcggccctccgaggccgagtctttaatgcgaatggactgctcctctttgccccatgatcttgacgagcggagaatccagtattgcacccattctcatgaaggacgtaagatgatcgagcacagattttgattgatgcattcgcttcgccctcgacgaagacgctcgacttcgaaatacttcagaagaacacaagatggcggagtggggtttcctggagcactggcgcgtggtactgcacaacagcgcatccactgaattcactgcatcgactggaactgctgaaaacaacgacactgccgacccgattcttcacgtgtcaatctctttcgcggaaacttatttatcgggacagcaaaagtattgcgttgaggcttctcgtagacgagagaaaccagctggatgcgagtcggctacgccagcttcgagaggctatggagctgttcacgcttctttcgatggtgaacaataaagcattccaagagttaatgcctccatcgaccgagacgcagccgccgatgaccagagaaaagcggatacaactaccgaaatggggggactcatccacctaacgacgccgctgcagcgcaggctccagtcacgtggggggctttgctggggtttccggaagacccttgggagtattcacttgagtttaaggaagctatcacgaggcttaaagcgatggggctcgacgaatcaacgagcaagtacctctcgaatgggctttcaacttactggtactatcaacactgccggaggggaaatcagactggcccaactgcatacaacaaaggtaaatggcttccagaatcctgtcccattcgccgatccaattcggggtcaacttggaaggctatttgataccgttgttcctccgattgtgcagatgtgtggtaaaactggccctaattgcgctgcactctttgtcactgatccatgtgagagtgtgtgggccacgatacgggattgggatcattcctgggctcctgagctaacagtagcgctggctaggacacccatatcgaggcttaacctgaacgttgggcacacctggttgcactcacggcaagccaggatggataccgggtttcttctcagtaccttgatctgtggccgccccctgtgcgctgtggacggacgaagcgccgatatacttcccgataccgttcaactggaatacggcgacctgaacttgtccggcttctgggtcactgacagcgaaatgtttgttgcaatcggctcggcggtcgcagaggcgtctgcgggggcgcatctgtcaaggctcggcataaattcaaggtttggacggtggacctggttgatttacgcactctgttgtggatcctcgcacgcgtctgtatcctcggcagccatttcgcagggtccaacaatgacgcagtctgccattttggccatttccgcggtgctgcgagccaattttcctcaaccaatactggaatcggatgacagcggttgccacaagtatggtttcgtcgacattcaagggggaagtgagctgcaactctgtgacgttcgtgagtacgaagaaaacgaattaattgtgtcacgggcatgccactgtcgagcccttcacgacccgcttgacggtgagtgggttacagtcatcgtgcctggatacggagtttgcaaggcgaaacttggcgaaggtatccgattcactccggattcagataatccagccttcccagtgaaacgattgtgcggatctctggagataagccgcgtcagattcgagaccgctgcagtgttgatggatctgctgacgttggtcactagtggccttcgcagattaacactgtttgcccccgatgacgacgccacagccgcgattcaaatcgacctttgtgtattttcaaccgcgtgtccagaactccgacatctttctgtcacgcactttgatgtggtagtgtcggcccataacgtgtccctacgtcgctggcccgtcaagacgatattcttacaatggtggcaagaacgcaggagcacgttgtccgacgtgacgcggtgcttgaagaatactgaactacgaatgactcgcgaacttaccagcctggaagtaagacccagttcactggtcgatccggacgaagtcaaggagttaaatagccgcgacggcgagttcctgcctgtcgcgaaggagaagctccctgccgagtcgaaagctgccttgatgagtgtcgccacaagcgcaaccagtgccgcgttgaatcgcctcatggacgcaaatatcctgagcctcatctttgtgtttgcctcaactccggcgcagcgctcggtccattgttggaccgatgaggactatgagtcggacccagacgattggtaacgcattgatataaagttttcctggataattttaccagattgtgtggagaatattggtgtagtaagctacaactaatcgttttttgctaatgcgtttaatggatgcagctttcacacaccttcatcttctatttgtcacatagatatcgatgtttgtcgatggttgtgacgggtacgacacggtcttgtaatgactgaagtcgcccctgttcgccacattcagtttcaaatacaacacgcgatggagaaatggggtttcttggagccttggcgaattgtactacgcgaaagtatcacgaccgaaatcactggggcgctatcgctgttcactcggatagaagcaacgcgggctgacaaaaagattaacccggtcctccatgtgtcaatttccttcgcggaaaactatttaacgccgaaaacgatttgcttgaagcttccagttggggatcgaagcgtcgatgaaaaaaagcgtctcgaatgggctctcaatccgatgagcttgagggtattggtgtctagcaggtgaatcggcttcgaggcgcttaatgcgcccccaacgacactcatcatgcagggaacatctccttcatgagcggtaagaactcgtcgtcgtgagtctgtaactcaattacctctttcccgtcagcgaagaaaaggtcatcgtacgatggatttacttccagtttaagaagttggcgagccattcgtagcgctgggttggtcgtggagctcagcgggcggccacagatcaacgagttgagcgtgaatccgacattcatcgctcggtctcgccagtacctcgcaccgctctcaaagctcagtgtgaaccaggagattggagtccgagccagcgccgtagtaaattcggggacggtctgatgatcccaatatcatatccctgcgtccacgatcttgcatagctcagttggtatacccggtgactccgatggagtagtaaccagcgaagtgcaaccctgagtagcacaagtctgcgctacaggaggagcaatggcgtcgaatagttttcgaaattgaccccgaagtgggttagatggatcgtccgattttacagccgtgtggtcgccacttacgtttactgcctccagtgtgcatttccagcttcatattcgcctcaactccagcgcagcgagtggccaagtgctggaccgcagcggactacgagtcggagtaaataagtgagtaacagtaagtacagctgcacttcaacatgtccaatacaaacctcaagtttttcccatcccattatcatccaatcacaaaacggtatctctcttctgattcgctgaaaatcggaccaattggacgccaaccatcggttggctgaacggagctcctcgcctctctcacctcctgcacgtcaattgaaagtccggtcggtcggcccagcagcagcagcactagagctagagctagagatcatgtcgtttcggggaggacgcggaggcgctcgcggaggacgcagcggacgtggaggcggccgtggcggaggccgcggcggcggcttccgcgagcccgagggcccgccggctttcgtcgtcggtgcgtacgcagctcaactgattgacacataggtagatatctgtagactgacgcgttgttgctgttgtgattgcggctgcagagctgggctccttcatgcacgcgtgcgagaacgagatggtgtacaagagcacgaacgacaaggtgccgtacttcaacgccggcgccttcctggagaacaagacgcgcatcggcaaggtggacgagatcctcggctccatcaacgaggtcatgttcacggtgaagcccgacacgggcgtgtcggcctcgtccttccagactggcgacaaggtcttcatcagccccgacaagctgctgccgctcgcccggttcaccgagaagcccggcaagaagcctgctggtgccggtggccgcggcggccgtggcggtgctcgcggtggacgtggtggcggtcgcggcggcggccgtggcggatttggtggacgtggcggaggccgcggcgggtttggcggacgtggcggcggccgtggtggcttcggcggccgtggtggaggccgtggcggcttcagcggacgcggtggcggccgtggacgctattagagactctgtcgcccgcttagcctccaaagtagattattgtaacttcactgggaaaaaagcaaaacaaaaaacacggttgcatgttccagcgttcgaggtgtcaaggagtcgagtcgatgtggagtggtgactgcagagcagtatgtagtgcaggcgcctgtatcgcgtcgcgtgacgagcccgtaacaactcagcaggaaatctgcaatgcaaaatgctaagtgcgtgtgctgttgtatcttgcagcatgacaccaccgcccacctcctcaatctcaacagcaactcccacgcacaacactcgcaactcaaaaatgctgtcaggagaccaaacagcgatatatacttagcgtcatagcccactgcgtctcggccgtcagctccaagtgcccgttcccgttagtcccgcagtctagatccgctccagacactcgaactgcacaatgctgttgcctcgaatcacctggtcacaacccggcagcaacatagcaaacatagcagaaagattagcaacgaccttcactcacccacccacctacagtcattttaccccagtaactacggggcctccttaccaccatgccgatgcggttggactcggtggccgagacctcctcgaccgtctcgtccagcgtgacgttcatgaactggtcgaagccgcgcagcacgcccgacaccttgcggttgccgttgagcttgaggctcaggcgcttgtccatgtatcgcttgaggtcggggcccgccgtcttcaccatggctgctcctgcttcagctgcttcagtccacttgctttcggtctcccgcccggatatgagcgagcggttacgcacacgacgcgcacaccaaagtggtgtggcgcacgccactctcttaacactcgctttcactatggtccgtcctctttatgcgacatgtggccaaccttctcgaagccgccccccgcgtacgtaacccccgccgagcctcacttcctaaaaccccgcgagccacgcaagcagctacaagcccaaggcgcaggacccaccactaaagactcacacagagcaaccatgagcaagtcgagcggcttctcgcagggacaggactgggaatcggccggctggggcagccgcgcgccgccccgcggtgccgccaagcagcaggcgctcaacagcgcccgtcgcgcaggcaccgtcgtcacggaggccaagtgtacgtggatcttggctctctcacactttatactcctctgtgggtgattccgtaatcgtacctggaagagctgacgggttttattaatttaaacagacaacgccggcaccaacaagggcgcgcacagcgctgcgaacgtcaacatgcgcaagctggaggaggacacggacaacttcaagcacgacgccgtcgaccgcagcctctcgcaggcgctcatgaaggcgcgcatggccaagaagatgaaccagaagcagctgggcacgctcatcaacgagaagccgcaggtcatcgccgactacgagtcgggccgcgccatccccaacggccagatcatctcgaagctcaaccgcgcgctgggcgtgcagctgccgcgcggctccaagaagaaaaagacgcccgccaactaattgcaatgactaggatagagtcgtgcagttggttgtcagaggtcttgttaggcagcgagacaggcaggcggacgcactacagtaggtagtgggctctgcattttgtctgctggagcgtcgtactatatagaaaacaagcaatacaatgaaggccgagttggctcgaaacctgtgcgggtgtccgagcattgaaggcttggcagcgtagagctacagtggctgagtcaccccatgcatggtgatctccgccacgtggcaggtggaaatgggtacacttacttcaacttgtcttgtgtaactgttcattgcggtgcagcacttcagtggtcgatcgatcatgcgaagcgactcgctggatctctctcgtagctggcatgggctcgttcgcgccggctaaaaacagcggagccgtttgccgtttgctggtctccggtgctccgctctccgagtttccagcgccaacgcgaagctatgtatttatacccagccacataggtaatgtacgtcgcatgctgctgttgtgtgtcttcactcgctttctgctggaacgctggatgggaatgtgctcttgggtcgcaaaaagcatcaatacagctgccatccatcaacccgccgagctcagccgagctgcgggtctctcttgcacctcggattagactaggcccagcgtcgcatttgaaacgagcgcttgccccgtagcttcaattcttcatttcgcgccttgctcgcccgtcgcactcgtttagactagttcggcatggcgagtaacaatcccagtgcctgcaacgtgtcgccatcccgcgtggggttccgaagtgggccaacgtcgcctccagcaccgggaaaagttcaggttccgacatacgacagcgatggactcgaaagcgacgacgagactctgctcgcattatcgtcgctgcccaagatggagtcaattcgcgcccctcgtcaagttaaaccggcaaattaccagcaggagcagccgattatctcctcgaacgctgtcttggacttgtcgtcagactgtatcgatgtcgtacaacaggccattgatgctgtagaagaagcgcttgcgcggtgccccaagtacgaacggcgcgaggcgcttaccgagctgctgatgcacgcaaaactggaacaggcgaggaaggccacggcacatagcgctgattgctaccagcacgcgaatgtctgggctgcaatgctgatgcaggtgcaggaactcggacgcaattaccccaaagagtacgaaacctccacttgcctcgccaccggaaaaacacaacagtctcacaacatgcttccttgttgcgatgtacagcccgcaggttcaccaactcgtgtatctagtgcagcaatgtgtagcgaggggcgagaagcacgaagttcctgagcatgatgagcacgaaagctccactccatacaatcaccaacaggaggacagcgagctcgttgtggaggaggaaacgcatcagcaagagcttgaggatgataccgacttgtgtggcaggatgggagaagctgcagttgatgttgatggcgtgctggacgatgatgacggagatatcggctacaggatcacggaggatatcctggagcccgaatccaaccaggccgaggacgaaagcggtgatgacgacgaattgaagcacgacgatgaccgggatactagctcacaccacgatgacacggaaattgaagaactggatgagccggtgaagccgtcgaagcagtcgaagaaatatgcagcagcgtcccccacctctcgcctacgagtacttctcccgatcttgacggcgaacatcatcgtcaaaggtgttcaggtaccccgccttccccgcgggagtgacggaggctatagcagcagcgactccgacaagtcggacagtgctagtgtttccccgagaaaaccagtcgccaaggtaacaggaaggagctcgcgccagaagtttcaatttcgtgaaaaggagttgctgcagctcttggaagacgaagaggccaagccaggctcggccttgagccccggtttgcttcgacgattcagcccgaactcaaaaatcactggaacagtaccattgagacgaaagtcgttctcaatgaagcgcagcccactgaagagtactgcattcgctggtttcggtccactccctgttgtgtcaagctccgagacggcaaaggcagcctcgccaagtgggaagtcaacaaagcagctctgggctgctcgacgaaagtcaacaagcgcttgccacattgccgccagtgcgcaacaaactcgccgcaacagtaagagcttctcggtgaccaaacaccaaatccttgcctttaacaacatcaagaaggtggcagcagctcccaggaaaacctcgtccggatcaccccgatctctatccaaaacagcatctccagcttccccagtatctggtacccaaacacaaatggttttgcgcgttcgtgagcgtcccagtgatggtgtcccggagctcgtgattgccaagaagcccgttcgtttcgtcgtgtggcattggaacgaccggtgcattcgagtcccgttcatgagcgctgcgaatttcatggagcttgggccagcacagcacggcatcatgctaaggcagctgcgctacgtaaagtcgatgatgcacgagctaccgtgggctaaggctcatttgcgctcgctgttgtcgcgatacacggccaaagaggtatccaaggaggagctgtacccacaactcaatgctctcggtctccaggtgcaacgtgaaatcggttcccgtgccaagcagcaccgtgcgctcactgctcgcaagcagcgactcacagtcacattgacactggccacaagtgtcgtaaacgacaccctcgtgacgaagttcgggcgacgcggtcggccgcatgcctcacgtctgctgtacgacccgaccacgccacttcagcttcgctggagacgtaaacatggtgagcgcagtgtcgaataccttgcagtcgatgagatagaagtcatcgaagcgcccgacgcgtcgagactgagcagtggaaacgcaggaacattcggtcgcggaaacaagaaggctgctgctgctgttgctgtcgacccggagtcgtgtctgtcgctcgtgacaccgtcgcgttcgctagatctgcaagttgccagtgcactgcactgcgagtggctcgcgaatgccatccgcgacatcgtatccttcgcgcagcagtacaaggctgccaagactggcgcgagctccagcgacgaaggcagctccagcgactccatgcccggcaccaccgccatcgccatcgcaagacggccgcgacagcttcccttgtcacgcaacgtcatgctctactaagacgttatccacccagtacatgtagaacatacccctaggtagcacacattcaagacacgagtgcagcgtaggctccctagcaacatcaccatagcaaccagcacatcacaatagtccagctcatcctaaacctcaatagcaacagcccaaccctcttcctagaatcagcagttgactgtatttcgactggtagcacacgcacagtttgcgcagccttgcatgcacccaccacccacttacatcttctgtgtctctcttatgccttcttcttgtactgcggcttggtgctcttggtcagcagccacacgtagaagagcgacatgccggcgctgtaggcggccacgagacccgccgggaagaaggcgcccgtcgtgttgaagcggttgcccatgacgaccgtgagcggcgccgacacggccagcgacacggcgggccagagcttggacgtcacagggctctgcgtgtactcgttgtagctgcagtagcccacgaagctgaggaaggcgcccgacaggccgccggccaccagtgacgtggtgctgccggagctcacgaagcccacgacgccgccgaggcccagcaacatgccgtactgcgtgtccacaccaccggaacacgcacataacgagtcatagcgagcgagttagagcgcagacagagatgcaaagcgcatggacggatagaggaagggaaggcggagaaaatgagactacgcagagcgcgcggacgtaccgggatcgtgaggcagaagtcgtacatggtggagacttgacttgacctgtgctcgacgtgctcgtaaatgaagcgagaatgattgtgaggccactgcgcgagccacgattgggtgaaatttcggctggcttcaactggctcctattggatgatttttgatttgaagggagccttgttttagtgacagaaacgtctcgaaagtgtgacgggtatagctgttgaacttttttaaattgaagttagtaagttgtggcctaaagcttgtgggcatggaaccattggttctcgaacaccttattaagccgtacagattaccctgatgcccggtactcccgcccccaagatctggttcgacggcacaaccgtcgacctgatccgccgatggcaagtgaggggacacgatttcgcctttctcagctgctttaccaccggaatccacatgatctggattcccctctggatcgccagcacgatcatcttgcggcttcgcgtcatctatcggtgcaaacgcttgatccgtgatcggcgaaggctgggagtccagccccacctgtttccgctttggagggcattcctcctccgatccggaaggttcacacaccgactcaacaggatccgaccgtgggtctggtggatctccgacgaggacagttgaaggtgacgaccccgactcctctgtcacgcgatcaccgtcctgcaacggtctgccccctgatctaggagtatcaacgacggccacccccggatcagggctcattgcctccggttcgcttggtggatcgggtggacccgtcgattgatcgatgatcggggataccttgcgtctctggagaatggctcggggcgttggataaatcggtcgctcgacggcaggtactggaggtcccgttgatgcctcctggttcgtcggccggtcatctgtcgtggcttgaaaggctagattctgccattccatgtatcgacgagatccgatcgacacatatcctgggatccgggtatccgatctccagccagccacatcgcgatccgttcattccgatgcaagacgaggtctttgtcgctgatgttggtaacctggagatatcggatcctgccgggtcatcggaccacggtcggcacccagcgatctccacgggtgacccacagcttttctcgatccgtcaccttcattcgtagcggaagctcgatcgaatccccgatcgcgatctgcattccctgatccacacacacgtgtcggacattgtcgttgtacagctgacgccgtccgctaagctggatcttgacttcgtcggggagacagatagagccgtccgcaagatcgaggcgaatccccgccggaaccatgaagtccatacccaggatcgcctcttgtcctgatagatcgccaacccagatatcgaagaaatacaccagcgatcccgccagcgtaaccttgatcctggtccttccttccgtcatgtacacgctttcgccaatccccacacattcctggctcggactcgtgtcgacatagcaccccaccttacgagcaaaggcggtgtccacgatggacacatcggcgccggtgtctaagagtaagatcgacttctcattgttgatcttgccagtgatcttggcctgacggaaccacttacctggcgaatgatgtttccagtaccctctggactccccagggaggagatcgggcaccacatcgccagatctgcggtgttcgctgacgcgaggccgacttcgatcgcgatcatgctccgggatctcggtcgtcacttctccaccagctggcttgaaccattcctccggtctgcgttgcttccaatagccccgcgtttctccaaactggagatccaagggcacttcgagacttaagtccttggcggcaaatttcgcatgcagatcacatgtattaccgcgtagatcagtccgtccacttactcgatctaccgtgttcttgtttacgaatgcatagatgcagtacctagaacgctcggctcgtaccggattccaacccggcgagcgtcctagtttaacttcttctcggcgatcgcgggcaacatgccagcgtgcttcaccgggttgaaccattgacggatctggttgtagaattcctccatcggacacttgcccatctcgtgtagttcaccacatccacggcacacaaacaggcagcgatccgccggatgacctctcttgccacacttctcgcacgtcaaacgtctccaacaatcgagatcggtgtatttccgcgatccacagtgtgagcagcggtttgatcgctccgatccgccaggtgaagatcgcgatcgtggatccgatcgaggtgagtcatggttgatctgcgcttggttgcctcgatccggcttcgtcgagtcgccccccgcgttgcgagacttgtcatcggccgacgctaggtaaacgcgacgtagatcaccctccgagtccgacccttccgatcctgtgtccgatccagactcctggctcgcgatctgaaccgcacgcactgcccgcttggttgcaacagctggtgctgaggtcggaactttctgacgatacttcgatccaaaggcgggtcgcttctgtctactcttcgcgcgctctcgagcgcgcaggacttcctccagatcttccgcgtccgcaagccggagtagggtgagctgatcggccagttccggatcgcccagcgtctcgataaagtgtttgacatgttctcggcgggccttggaatccccgtccttgatcttcaatcttgcacgtagagccgccacattcagtcgatagaggtactccaacggcgattcatccgatctcttgcgagaatgataatactgccaagcgaccgatactcccaggccacaatactggatctggaaattccggagtagatcgctccacttgttccgcgtcgatcggcccagctggcggtaccagttcttcgccgggcccgtcagtagatcagcgaaggtcaagcacttctcttcgtccgtagcttgatctcgcaggaacgccgatttcaccttgctgatccacgatcgggcggatcttcgtcctgatccttgccactgaactccttgagatcggacatcgcggagattcgcacgcgctggatcaaggaggacccagtggatcccgaggcagcggtggccaccgcagcaggggccgaactcggtagatcaatatcgtccggatcgtattcccactgggagagatcttgatccggtgatccggctgattccgtctccacgtcccgcgatccaacgttgtcgtcgaccactggagtaggtgttaccaccgtggcctgttgttccttcagaaatcgagtcatcgcagcctgaaagtaagactccaatctgccattcgactcatctgatccggtggcactggtggtccgatcggtcgacttgggtttctgcttccgaggtcctgaccgcatgcgttcctgacgttgactccgtgatcgcgcgtccaacatcgcagatcctgaagggccgagggacatccgctggggttcagacgacgtatccgatacatgttccgctgcggagacataaggtgacgacgatcggtacccagtggactccactcgaggcgatgacactggagccggcgacactggatctggtacattcgggtccggactgtccgcgatcatgtcgaccaaaggtctcaacttgtcgaccaatgtctggatcgctgtctggatcacatcgagatcttgatcgaaaagatcgttcgcttcaaaggcgccagccacgaagccggcttccttcaacagcccgagcaggttcttcaccgccatcagcttgttatccgtcactcggggggccgaaatcgggcccttcgggacgtcgatctgctctggccgcacgatcaccatgacaggatcttgacgcaagaagtctcgcagttccttcaagtaatactgacgatccaggtcagcctcagaccagtcgagcgctgacggtctgggatcttcgtcgtccaagcctggcgctctcagcttcttcctcacgatctgggtcttgtccgcgatcgcgttcaggtagcccggatcgagcctgatcggcgagtcagcgaaagcgtatcggtccgatcccgccttagtttgttttgttagtgaatctcggttcgcaccaggatccaccggggtccccgaagggatctggggaggatgttgaggtttgtcttctagatctgtctccaaatcgccctcgattccgtcgacagaagtcctccgagcactctatcgatccgcggatctcgttttgttcagcagcgtcttcgtcgatccgatatccgacgacgcctcttcccctggttctttcttcacttgcgcatcttctacggactcatggtgaatccggagtcccccagagatccggacacgcgcaccattgtggggtagctggatcggccaaaatctggttaaggcttgatcgagcttcccaccagcgcccagacaccgactaacggagggggtcccccaacgagccgtgatcggctgaacttgttctcaccttgtgtacccgtcggcgggctggatccactctctcggggctccgaagatgcagcacttggtgaagatcgagtgtcttgacgtgacgcggggatagtttgtggagcagcgcgggaatcttcgctctgcgtccgagtatacgttccgatcgagggttgttcgctgcgatcggtcggcctggagtcgatccaaggcctgtagttgcctttccgggtgtgttccttcctttcctgggttgcttgccgcttcctatagcgggatcgaggttgatcgagaggagaaacgatcgccggccaagcagtatccggtcgatcggggttcgcacacaagaaatagatcgctagagtaggtcaagctggccaatgtattaatccagtcttaaccgtaccactagctcactgtccaaagtgtcgatgcttgccgaggccaatgtagttcctgggacttgacgacttgggggacttgtgctctttggtgcaaattctcttctgatttatgtttagctggtgtctctctaccgctaccatcttatctaccatcctacagctcaacaaccactggattcttgtcccgacttcgtcctccatgtgcatcccatcgtggtcgatccacgatccccgatcaagccacgatcgacttatgatctgtgatcaacccccgatcggcgatcggcgatcaacttccgatcgaagactcgtgccggttgccgtacgccgccgatccatcatcttctgtcctcggccatcctagatctgcgagacctgtcgtcgatccgggctttggtcacccccgaatcacgccgcggctcgagcacgatcatccatagtccggcttgccacatgtccttgccttacgcgctggcgtcatcgggccacttgagatctcccgaagaactccctctgatccatagatcctcgctgcctgtctctcgatcgctgatcccccatacttccagtcgatcggtcctgccgcctttctaggagatccattcttattcggcacttctgcacactggtaccgtcgattgagatcctttcgccatcttcgtcttcttcttcttgttcttgctcttcttctcagttgttgctcgtaaagtcagttgacctgcagtagcacgagacacaaaaggtcacaccaatcccgggtcgcggcaccagtcgtcgtgtaggaacacgcactaaattatataatagcacactttccccaccaacaacacccaccaagtcccgatgactcaatgggcttgttagggttagaacctgaaggcccaggaactttcccttgcaccgggttgacgtttcctctgtgcaccgtgtttccgcttagtcaactgacgaaaacccagcgtcaccagccacgagcaaaggctggcacgctctcacacacaatataaacctcgcaggccctcaggaaggaaggatcccagccagtcacggcttgatacgagggtgccggagctatactccggcgggaaggataaatggagtgcgctctcgctcctccactacacggcgatgactcgcccttcgtatacacggccacttcttcactactcttggcctgaccacgggtaaacgcacgctacgatactagcaggcgcgtccaccgacagtcacaatcctaccaacaggtttatccaattgctacgggaactcaccgatagccctgacatcttccttgagtggttgggaggaaaagctgttctgttcttgttgcccaaagggcttatctgttccatcttctctttcctatggttcaatacaaatatctagtctagacgtgtccgttgtggatcttcccggtaaccacccgactcttcagaactctcttgaaggctcggacggcctcccgatgactcgaagagtcgcctcaggtgcggaacccaggccaaagttcgccgtaggttcgggtcgtccttgaagttccggtgttgtgtggacacaccacggcttgagcttgagtgtcgacgagtcatcgtcatctgtccagactggccaatccgcggtcgtcgaacaccatcgaacgaatggcgatgtgcctcgatccgccagttgagttgacgccgaacgccgcgggtcttgccgtgagcttcactcaactttcccgacaccacaaaactcacttgtaataggcgtagcccgaaatctgattcgtatctacagtagatacgctttcggagcttcgactaccgtgcatcttcgctcgtactagcctacgaaccgcaaacttgaagtccatcatgggcaaaagagcatccgttcgtcttgtcaatcttcagccaagtgacagcaatcgaggtcttctcttggactctttctttggaattcaatgggtgaaacctgtccagtcagctcttgcagtagcgaagcctttggccaagtcaagggtgatacagtttagaaagccaacttccctctctcgtattgtcaatgtaacgtacaacttgtattattgtgcttttcagttgttttggcgaatcggacgtgtaaaacagctacctactaagatggggctaggttatcggagcagattagcaggtccctcgtagggaattaggaccaagaattgctagtccgatggaagcacttgcgcaggtccttcaaacagccgaaagcccgaatgtcgcccattttcacggcattcggggtttgaggtcttacgaaggactcctgccaagtcttgtggcaggactttcatacgagctgactctaatacgacgtatgtcaaacgcagaataaacttagggaaacacgatgcagtcgatacgttaaacactccagtcttcgcccttcgccttcgcgggttccggcattgcttgcttccctaaacaaagcttggttggcttggactccaaccggagtccattgaacggagagactccgggagaccgctcatcggactcgtccgagatttccatctcagatttagagaccgccaacctcagattaactgacctccaaagtcctacgtaggactcggcaaaatgaccgaaaggcacaatacatgtatcccacaataccgtactaaactggatagagaaaaacaaattacgctcttcatgaaaaagtggttgggttttggttaaatttcgccgaatgaagagggtactttgaaatatttactaagcgtattttatactacggtggctgacttgttcgcatcgctgttccgcagtctgaagatgaggctccgcatattctcgtccacatcgtgaagtgactttggtgtgctggttacactcagtcttcggcacggactcgccatcacgggtacagtatcatataatcgaaagatggtggagctccgggcataccgcacaggagagcgtagttgcaatagcatggcaagtacttaattaaaactaatgcagcggttcgtaaaggggataagtgaagtactaaagccaaatctggctttcttgtgcaaattgtgacggagcaccacatgggaacgtagcatgcgtctggcacagcgcgtccattccccaatttactcgtgttgacacaatgcagggcgccaagttcctgttcatctacgtgggtttactcggtgccgccgcggtgtcgggggcggtcatctcggaggtggcgacctgctactcgagcttgcagcacgacgtcgagttcagcggcgctgaggttggccgcgtccccagctcctccgccaacgggtgctgctccatctgcgcccaggtgaacggctgcaatgccttcacgtggaccgactacaagcgcggcacgtgctggctcaagagcggcgagggaacgtcaaagtcgaccctcggcgcaacctcaggaatcgtccaggcatagcctccgtccgacgcaccgggctctgggagtcaatgtcgactgcagcgggcagtgtcacggttggaagcggtctcttcgagttgcgcgttgtacaacggcggtactgaagagctccaacggagcgtcgaagtcgaacccccggcgccttatcgagggttatctacatgtatgtgtacttaagagagtaaccttcgctattcattagaaatatcaacaataatctctgtgagcgacgtgcagagtgtagattctactctaagcctcttcgttccgatgtccgccttgtggtgagatcaaactctcgatatgccggtcctctttgggcgaatatcgtgtcgactggtggagttgaggtgtcgatatcaggaacggctcaacttctaaatgctcgacatcgacacgtgaccgaccgttgttgcggagttgaagcgaaaacgaaggtgaggctcaggatgtaggcatccaggcggttgatcggcttcgtggcattgcacgcacactgatcatcgcagcctttgaactcttgggaagcttttccttgatcacaggcaggaacgcaccgttgaaagcaatgaggaccctcagttcctcctcatcaaatacgcacctatacgatgtcacttcaagtttgaccagttctcgagccattcgcaacgtggggttcctcaaacatcctgtcaagtccgacaaggtacccgcatgttggagtaaatctatttttcttgatgggccagcgacgtagggactcgtcatgggcagacaccaccacgccaaattttgttatgaacaactcctggagctctggacacgcagaagacagtgcgcacaggtcgatgtaaatcccagccgcgacgccgttctccacaccaccatacagtgataacgaacgaagaccgcgggtaactagcgtcagtaactccatcaacacagcaggggtctcgaacgtgccagcgtttattaccagcgatccgcacactcgtttcttctctcggaagaccggttggtcataagcggggatgaatttgagtccttctccaagtttcgctttgcaaataccgtatccagggacgacaacattcaccgacgacacactatcggttgggtcataaagagcccggcagcgagatgtacacgatgcaacaaagcgagcaccattatcaccatctatctcggtcggatacagctcggtttcttctcaaacatcgacatatccatacgcatgggagccttgccccttcgatctcaacattggtcgggggtagttggactggagtacggcggaaatcggcaaaatgtcggacctcgtcagtgcaccacgcaaataaatctcgattgctggtaagtacacgcacatctgatgtcccgcaacagagcgcgtaaatgagccaaggccatcgtccagagccctctaactcaatgtcaaacgagggcaaatgtgtattagccgacaactccgcaactgccgagcagatcgcagcaaacaccccagtgcatacgttcgaggaccgtaatgtcattttcctagatgtcaccgggatacgaagaagcgttctacatttttccggtcacaagccgcctcgaagaggctccacacaccaaagtgcttaacaaattcccagcgtttagcataatttgcctcgaattcgtcgaaacaacgttcaaatccagcgataaatacgctctgtcggtcctagccaatgcaatcgccaattcggagatgacggggtgattgcagttgtatatcgctgcaagcaccgcgatgcacggcccacttgttatacctggtgatcccagtggaaccgcgagtagcacacatctgcacaatcggaggaacggtgacatcgagcagtttttcgaagttgaacgtgaactgaggtcgaggtgttagccgctttgaaaggttcctattctccgtccaggcgtgaaccttgaaggctgcacaaccagccaatcgaagacccaccgtgaacaaatgctttgctagaatcctccactcccatcgcttctaatggctgagctgctgctcgaaacttaggcgagtactcccatggatcattcgggaagccgaggacccccccccccacacacacacgcgtcacttcagtcgcgtatatttcgccaacgctatgcgacaaagtcccctcaggccggaatttccattcggggaagtaaacgaggagctcaccattctgtgcaatcttgatccccgtccaggactgcagcagctcggtgaatgattgattgtccacaaacgaaagcagtgtgaacagttccatggcctctcgaagtcgttgaagtcttgttgcatctcgctgcccccactcgtctactggaagccgtaggcggacttttagctgcctcgcaggtgtcggattatatctggataggcaaaggacacttttagagcattgtcttgtttcgagctatcgcgtaagacagcccgccaaggctcgaggaagtcccacttggtcgagtaataaacgtgaggcaggtcggtccatatcaattaagtggagggggggtcacagttagacaacttagtaatggactgatgacaagtagcttgacactacatgctcacgcggtcctcgacttacaacttggagtcggccacgacgcgcgacttcttctccatcttcttggaccagccctccagcgtttcgcgcggcatgacgggcttcttgtagaggtagtggcctccgtccacgatcaggacgtcgcccgagacgaagttgcccacgggcgacaccaagtagagcaccgcggccgcgatgtccgtcttggcgccgacgcgccccacggggatggtgctggccatgtacttcttccgctcctcggggtccacgtctccgccgagcttggccgtgcccgtcgtgtcggcgatggggccgggggcgacgcccgtcacgcggatgccgaactgcccccactcgagcgccagcgagcgcgtgacgctgtccaccgccgccttggccgccgacgcgtgcacctggtaccacgtggcgggcagctgcagcgtggccgtgatgttgatgatgcggccgtcgccgctgcgcttgagcggctcgaaggccgcgcggctcatgttgaaggtgccgatggtgtcgatctccatgaccgtgcggaaggcgttggtcgagagcttgtcggccagcgccaggaagttgcccgccgccgagttgacgagcacgtcgagcgagccgaagcgcgccgccacttgggccacggcctggtctgcgctctcggcggagcgcacgtcgccctgcacgtacatgcacgcgtccgaggccacgccgcgctggcgcatgagctccatggtctgctgcagcgccgtctcgcggcggccgaagaccgcgaccttggcgccgtactcggccagcgtgagcgcgatctcctggccgatgccggagccgccgcccgtcacgagcgccacgcgcccggcacacgcgtcgcggcggaaggttcgctggatgctggcggagtccatggcgggaggtaggaagagaatacagcgcgtggagcagcgagcagattgggaagtgctctgctctgcttcaacaacgcttcgtatgcaactgctatcgggaataatcccgtcctaccgcttgtatacaggggagcacgcatgattttccgccgtatacatgtatacacctaccgtctaaaccggttcgatcggtatgagccggctatgacgtattcgtacccgaagtgattaacgcaaccttaataggaacataaaaaatcccagaaggttgctcgagcaatcttatatttttgttaaagttgcttgagcaaccttgcaatttacgatacatttcctctactgagtagcttaccgcaaaatttctacttggggtaagatattcgtactgtaaaattgtcaaggttgtccaacgcggccggaagctcgtgcgaaatatgcttcatttcgcaagatccaacgtggaaggcaagccgaagacgtagcagcaagcgccatgttacccctgctaagtaagtgtgtttgccatggcttgggggtgcgagtacatctaacctgtgcctctggacagtcagtagccacgtccaacggccaagcactggacggaagtggacgacagccagcgactggatggctggaagacgctgcgagggctgtgcgtggatgcccacgccaaagaatgtgcgtggagggctgcggcgaagactgtggcagcgaagcgcgcctggaggcatcttatggtacgttgcactgtgcggagaaagttgtaaggtgcttgcgttcgtactccaacgtgtaccgcctgtgcgcgttcgagcagacatgaagatcacggttgcggtccggcaaatcgagatcacagccaaacctagatgggaagaagcgaaagctaagccgcgtagggcgtaatatatggtgtggatagggcttgaacagctatgttggctattactgtatgcttgacggattgggtttgaccgggaagtccttagcaactaccatttagccggagaaaccagcgctatgagacgacggtcttggtaggtgtaggctgcacttgtctatactcgatgtcttggcgtgatgaatatgaattctgttggcccatggccccatgctcgaggccgattggcttcgcacttttgatctaacgcatcgccaacaagtggcatgcttgcaccaggtaaatgtgctgcttgagttgcgactattttacgccgaccttcgcctgcatctctctccttctgacacagaacttgcggtccttttaactaagactacttcgtgttgcacgcggtgcccgtagaacctggcgggctgctgaaccacggcggatagcgtcgtggtggtgatagtatcgcttgatgcggtgcagctccttcctcttagcgtgttgaggccagcccgtatgatcgtcaaatatcgatctcaaaattgacgccgctattgtcattttctcctcgataaattaccggttgctgaagcaaccagtaattttagggttgccaagccgtttttaaggttgcggaagcctctttaagggtgctgtaaccggtgtcgttgtgtcgtaacaaagttgctttacggactgccattcgtaccgtttacatacgtcatccacgctatctcataccggttcatatcggtaagaatacgagtcaaagaccgatttaagtaagggtacagggcaccaatttgccgagggaaccaatttgccacctgtatcacctgcgtgtagtttaagcacttcaacatgcaatatcttcgcgatctgcccgctgaaggatgctagtctttccacaacttgcctacccgctaagaaaacccctgcccacatcgccagctagacctcactccacctcactcctaaatatatcgcagatacctcaagactcacctcgactcggttcacccttcagcatggcggttcgtcgacacgcatcttccgtcgccaagagcaaaacgtcgaaggcttccctgaacgctaaggccaagaccacttcgctgccgaagcgttcctacaacccccccatacaacccatgtcctccagcccctcgacgccggttgtttccggtcatttaaggcaacgtggcgcaacacgatcgaagcctggaccgccgagcatagtgctgcaaacctaccacgacactgccgtgcttcggtcatcggtgacactctcctcgagtcattggacatgacgggaatctcaaagtcgtggaggtcgacgggtctgtggccagtcaacagggaaaaagtgcttcgcaagatcaagtccgtgtgcaacgctgcagtcaaaatacgccaatttgtggccgtccatgaaccgcttcctgttgatcagatcgacgagaggggtctccaacgcctacgaaacgaagacattgactttgctgggtttcgtgcatacagcatcgtcaaccgagacctagccaagccgtctaaggtgcgcgagaggtctccaacgaagacattgattaagctcggtccgagacgcttgctgacgcacgaagcctgcatggctgaagaagaaaagaaggctgaagaaaagcgccgagaagcagaactcacggtaatgagaagagaggagagagcgacgaagaagatcgagttggtgacgcgaaaagctgagtgtcgtgtaggaacacgcactaaattatataatagcacactttccccaccaacaacacccaccaagtcccgatgactcaatgggcttgttagggttagaacctgaaggcccaggaactttcccttgcaccgggttgacgtttcctctgtgcaccgtgtttccgcttagtcaactgacgaaaacccagcgtcaccagccacgagcaaaggctggcacgctctcacacacaatataaacctcgcagaccctcaggaaggaaggatcccagccagtcacggcttgatacgagggtgccggagctatactccggcgggaaggataaatggagtgcgctctcgctcctctactacacggcgatgactcgcccttcgtatacacggccacctcttctcttctcttggcctgaccacgggtaaacgcacgctacgatactagcaggcgcgtccaccgacagtcataatcctaccaacaggtttatccaattgctacgggaactcaccgatagcccggacgtcttccttgagtggttgggaggaaaagctgttctgccattgttgcccaaagggcttatctgttctatcttctctttcctacaaatatctagtctagacgtgtccgttgtggatcttcccggtaaccacccgactcttcagaactctcttgaaggctcggacggcctcccgatgactcgaagagtcgccttaggtgcggaacccaggccaaagttcgccgtaggttcgggtcgtccttgaagttccggtgttgtgtggacacaccacggcttgagcttgagtgtcgacgagtcatcgtcatctgtccagactggccaatccgcggtcgtcgaacaccatcgaacgaatggcgatgtgcctcgatccgccagttgagtcgacgccgaatgccgcggggcttgccgtgagcttcactcaactttctcgacaccacagctgcccacaccgtgtcgcgagccacagcacttggtgagcgtcagggtgctcccggtgtcttcgcgctaccacggctgggtcgtctcgcgccgcgaaggctgcgctggcccgcgtgttccgggcgctcggcgtcgatcccgctgacatggtacgtgctgcgttcggtctcctgctcgtgccgtcaactgctcaccctcacgcgtgtgcgcttgttctgctggcggcaggctcccactgcgtcgagttctggtggcggcctctccggccaggcttctgctgcgtcttcgcctgctcggtcgtcgtcttctgctcgcgctgggtcgacggctgccggtactccgcgtccaggcgatgccgcacaggtgcgtacctgtctctgcatgcgtctcccttcttttcactcgtgctgacgttgttctcgttgatgcgtctgcttatatctgcagtcggctggtggcgtgcctccgcagccactaatcgaggctatgcgtggccacgagtcttcgggaaccccggcaacatctcgccctgggtctcctggttcttctcagcctgctcccgacaactcgcgcggtcgtggtcaagttatgcgtcgcgacgcccttgagcagctggtccgtgatgcatgtgatgagtcgtcggagcgcatcttggcggtgctgggctcgaagctggagtctctcggccgtctctcggtgaacctgcacctgggaccgagcatccgtggtgatcaccgcgtgggttctcgcctggcgtcggcccggaacctcgatgaagtggttactgctgcggagccgaacatgaatgttggcgaaggctcgacgctgggcatggcaactatgcgcgcccggctgcactctgctgagtcagcgcaggctgctgcagagaatcggttgtggtcgcagacgtactctttggagaaccagaaggtattcttgaagaacgcgaacaacgagatcgcacagctgaaaaaggaggtcgcgcatcttcgtcagctggaggctcattacatcgtcgagctcgagtcgtcgaacgccgccgtggatggcctcatagagtgctccgagcggcaggagaatcgtgtcagggtggccgaagactcgcaagctcggtctctagctcagttaaaccgtgagtaggaggtctacaaggcggccgttgcttcgtcgactgctcaaagcaggcgcttgcacgatctgctggctcgctcggacgccgccgacgacaccgcaccagctcgccttcgccgacgcaatgaggacctcaaagagcaagtgaagtggctgacccgtgccaacaagacgcttcgcgctcacgtgcagctggaagaaatggaccccgacgtcctggtcctcgccgtataaggttcgtagtcaccatttggtcgtcatttggtttatctttgctgactttgtcccgatgactcatcttgcttgcaggtatctcgactggtgaattgaattggagcttgctggatcttactcccgagtctctcgcgattttgcagaagccgtaccgtacagcagaccgccccaagccggacagagatatcgccgaagacttggctcggactgccttctcactgaatgactccatcggggatcccttgcgcaaggacactcccgctggtgcaaacaagaccactccggggacgtctgccactgcagtcaagaaatctcgcgcgtcgcgtcggtcatcgcctttttcacggttctcgtcccgcaagacgtctcgcgaagactcgggctacgtcatgcctgctgcttccccagctcggccgagtcgctcagggtcgaaggctcgcaagacttctgccgagtcatcggctgggtcatcggcgtcatcgtctcccgtgaggaagtcgtcggagaagcccaagaagttgcccaagaagtggaaggagtctcgctgggcacgaagtcgttctgcgtcggtgcctcgcggctctccggtctacgcgcgcttcatcggttccagtgtctctccgcccacgagtgctgctccagtcgcgaaggctactgcgccctctgttccttgttctgcgccgcctgctgcttctgcggaaactcctgtccaagctgttgtcccagtctctggttccggtgatgatccacaagttggtggcttgagtcatcgggctgatcgcggagagacggaccagcggtcagcttcagtcgagcagtcaccggaggtgcctcagtggttcggagatgactcggatgctggattgacggagggtctggttgacgactcagtggttgatggcggtgctgcttctgctgatgaggaggaactcgacgagtgggagggagagcgcgttgaggtggttgctgtagttccagctccgtcacctccggttgctgacggtctgtcgtcatcggcttccactgatctctcgtcacctgcgccagctctgagtcttcggcttctcttccgcttgttcctgcagctgctgctgagtcgacggacacctcggtcgctgtctcatcggttcaccggtctgcaaatgcagcatctcagaaggttctgacgactcgcgcccgaggtaagaaaccggctaagtctcgccataagttgtcatcgcgccaagtcgtcactacgcagttatcggccccaggaccaagttcaagttctgcgcgctctctgtgcagcccgagatgtgctgcccactgctcgttactccaaacacgtgttgaactaggccactccatacttggctcctgaattccggtttctggcgcttctaagtgctggatccagattttgaattgcgagttgccgactcctattcccggggatgctcggattgctgccacggctgctggtatcaaggcgtttaaagacttcaagaacccggaccacccttggcagcagctttgccggcgtctgccggagcacgcatgtttgttcgacacccatggatttgatccttctgtcaaggtatcccagcgagcgcccccgacgactcgagttaacgggtattggagcaactttcgagggtacggggatcctgtcgatattgatcttgggttctcggattgggagcgttaccactggattccggctcccgccgtggacaattgcttccggatcgctaccaaggagctggaagggaataattggtcccctgaggcgaaggccaaagttcgagctgagctggacgaggccaaggctgagtggttggcgtatgctaccgagcggaacaagcgctgggatcggttccgagccgagatcatctaccaggtctggaggtggtttgtcagcaaggaaccgaagttcgctgctctccacaccgagtctttgtttgagccttctatgctgggttgccctttcgacaacctcacgtggctgcccaagacgaccgactgggtcagcgagatttcggcgttggacgcggctgagccgtggcgtaatggctgggtggatgttcctgcccagcatccgtacaacacgacgttcttcccctgcaatccaaggtttccgctgttcgtccctacaaacaccacgcgcgaggaagtcgggcgccagatcgtcgtttgtcccgacctcacgccaaacgagatcgcggctgattgggatgctggtttccgtgaacctgcccaagcttcggacgagtcttcgggtcctgagccaagcgagcctccggcgtctgcagctacttctcacgtggctatcgacaactcggaccacctccaggtgctggcgcaggctgcagcttctgctgagttgcagggcgacgctcgcgaggatggtgacgactaggaagggtgagtcttcgggtgcaggtgtttcttccacccaagctgtttgagttttcacggttgtagtcgtaggtgcgttcagcttggggtatttaggttttcttgattcttcttccagatcgtcacgtccagttttcaaaaaaataaaaatcatgcaagtcttgtgcagtaatcgtcttcgtctgcgtttctgggctgcattgccccaggtacaggttaccatcttccgcagtagttattttcgtctaccctcctgggctgcgttgccccaggcgtagttcatcatctttgagtcgtcgcgagcgagctctaatcttcgtccgcgacctgtaccatctgaaggcgttgctcgcttcgcttgcgcctcaggtagtcgtagagaagacccccacaggagagctgggtgactggttcccacgtgggctcgtcctgatctgcccacttgatcttgaattcacgcactgagcgtcccgttcttgttgacatgggcatccgatcatccagaatctccaacacttcgttctcaccggccagactatcaggttcccagctgtcttcggggagtaattcctcattgaagtccagacgtgagtcttcggtgatgtcaggcgccagtcgagtcttcgggcggtctttgaattcactcactggcttcaaccgcgagacatggactaccgggtaaaaccgatagccgctccggttcgacaactcgagctcgtaggcgtactcttcgaccttcttcttgatccggaacgggccgtgccagcggtgggccagcttcttggtcagccccggcttgacacgttccatgtacagccgtacgcgactacccggctcgaatagagacatcggcgcgttgcttgaggggtctgagtccgcgtcctgattggttggcatcgctgtcgacgacttgttcctgccagtcgtcgggatggttgctctctccttccggctcagtgcttcgttatgttcgcgtgctcggcgggctttttcagtcgcttggcaatccttggccatctcgagtgcaatctggtgttgtcggttgacgtcccggtgccacgccagcgcgtcggattgtctgctactgcccctgcggagcgaggacgacatcgctttcaacgtcgactgagcgtcccatccatggacgaggatgaatggagtttccttccgtgtcctgtcttgtgagttgttgatcgcgaagaccaaccgttccacgatctcgtcccagtcctgctgaagcgggtcttcggcgtacactctcacggattgaatcaccgtcttcaccgacctctcttgctgcccgttggcttgaggccgataactcagcgtagcccgcgaccttgactgcatcatttcggcaaaggcctggaacacctcgctcataaagcgaggatcccggtcgtgtctaaccaacgaaggtgctccgaatcgtcggtatatacactcttcgaaagcttgggctaccttgagcgctgtcgtgtccgacattgccttggcgatcacaaatcccgtgaacgcacattggaacaggaggagggcagtgttgcctctccgagtcatcgggagcggtattacgaagtccatggacacaatctggagtggtcgctctgccaacacgttgccgggagaataccctcgcaactgtggtcggcttttgctggtgctgcagtccgggcacgacttcacatgcttctcgacgtctgtgtagaggccgaaccaatagtaatcccgcttgactcgctggtaggtccgcactaccccttggtgcccgccttctagcgagtcatggcagttctgcaacacttcttgaatcatcgtggtgggtaccacaagacgcaggttgatctcctcttgctctccagacgtgtctcgacgactcgaattcatactccgtcgtcggacagaacgaacttgtccgcaattttccaggcatctcgtgcagccctgtacccgagcttctcgacctcgcctcggaggactgttttcaggtttgtccaccgtagttcctcgtcctgagcggctgctatgcgccgtcgcctctccgcttggacttcgacggggtcaatgtcttctgcgtttggcgctgcgggcggtgcttgagctgctttcggtggtcgttcatcagtgtgctctttgtcggtttgagtcatcggcttgggtggcgtctcgttcgtactgtcgtccgcaaatcggactcgcttcgtcttcgatctagcctgtgaacgagtcatcgccatgatcctgaaaggttctttgcgcacgaaatcagcgaatgtcctgggtttggtgacctcgtatccgtccgcaatttgaatagagtctccaggaacatggttttgcactgttgcttcatctggcgtcgactcatagatcacttcctggatacggttcagttcgcagagctctgccttccgagtttcactcaggaccaccttcgacgtcttggattcaagtgtttccgacgccaatgagtctgcggccgcattgaattctcgaaccacgtgcaggtacttgactgaccgcagtcgtgccgtgatttccttgtggcgactcagctgagtcatcagcgactccttccggcatgcgatcacccctagggattgctggatcgcgagcctcgagtccccgacgatgaccaagtcttcggcgccatggtccaaagctgcaagcactccgttggtcatgccagtgtactcggcgagattaacagtcgtcttctcgaggcaagcgctcgccgcaatcactattgtccattctggtaggcgccacacgatccacgaacaactgccatatccaccatacttctcggtcttcgcggagccgtcaaaggagaccacaaaccccgtgtgagtcttcgggagacgtgggtacaggaagtttgggtccatacgagtcgtcggcgagcctttcgttggtggagcaaccaggtccagcgagtcatcgaggtccacaaagttggttaccgtcgactggagcagttgtgaaaatacgcagtccttctcctttacgcgctggacgatcaagtgccacggggaaagcaacacggcgaattgcaccgctctcccgaagagtgatttggacttggtgatccattccaacgtagagaaccgcgtgtacacgcggatggtccgtcccgctagctgcgtatagcaggtcttcaggagctggagtagagccaacacctccttttctgcaggatggtaattcatttctgcggccttcaagacgcgaccacagaagcgcacggggtgcagtttgtcgtcgtgcatctggagcaatgtcgagctgagtgcccattcgttcgcgtaaagcatcacgtgcacgtccttcttcttatcgaagtaccgacggatcggcgccgccgccaccttctcctgaagtgcttggaagctgcggcgggctacagcgaggccacccccgggcgtgaagtcgtcgtccttgagctggtacagcgcggctccatagactgcaaagtctaggataaaccggctgtagtaattcagcgctccgaggaaggactgcatcccttttctgtccgagggaacgacagcttcgtgattgcgtccagttccttgtggtctgcgcgcatcccatctcgcgagatctcgtgtgacaggaaatcgacgcgtccttgcacgaatatgctcttggtgaagctgacgctgatccggcactcctcaaatcggctcaagagccgatccagcgtggcaagacagtcttcgaagctctcgcctccggagcatatgtcatccacaaacgatcggcgatcaaacaccggaaccagtgacgagtcgtcgggctcgatggtcgcaaacatgtccgcctccgggctgttgatcagcagcaagacaggatctagtgcctgcgagtcatcgtgggcggctgcaaacttcgtgcggggcgctgcggaagggttctgcaggtatcccgacgactcgagtcgtcggagacgtgctgattcggcttcggcagctcccatccgtcccacaaaggccttccaacctcccttcggctgggcatgaccccacaacgcgttgtcgatcatgcgctggtagatcatcggcgcgttcttgaggccgaaaggcatgcgaagccactcgaagtgtcccagcgggcagacgaaggccgagatcttgcgcgctcgtagcgtcatcatgatggcccagaatccactcgcagcgtcgagtgagcagaaccagaggtatgcttctaggtcggtcaacaagacatcgacgagtggcatggcgtattccatgatcgctgtgatggcattgaccagcttgtagtcgatgcacagtcgaatgtcgatcccgttctttttcaggacgatgacgatcggcgatgcccacgggctgtcagagaaagacacgagcccagccttgagcagccccctcagcagcacatacagcttcttgggatgccgtagtggtatccgtcgggctcgttgcttgatcggcgtgtgcccttgcacgtctatgtcacagaccaccccatatgctggtggtggtaacgcattaccgcttgcgatcataattggctcatggttcttgagcaccttgattagatcgtcctgtcgtgtcgccgacaactcaggattccgcacattgtctgcgtcgtagtccagagtggtcgtagcagcttcggacaagtcaggaaggaacgccagctcgtgcgcgtagtcttccaacccgataccagccgcgagatgctcgaacgagtcagcggcgtcgtcattcgcggtctctgtaccttctgtgctcaagacccgcaagacacacatgaacgtctgctcgagtcgtgtcaaaccggcctcgatatccgagttcgagcaggattgagtcgtcgggacttcatcctcagtactctttgactccgtaggttcgtccaagccggttcccgacgactcatctcccccagcagggcgctcagacgtctccaaggcagctgcttccactcgagtattgagggtcacccctgtcgagtcgtcgacggctgcaactatccgttgcgcaacttcttctggtgcggattctggatcattgcccactggcaagccgtcagaatcttcacctccatcactgtcggacgactccgagctgtgctcgtcttgagagtcttcgggagaccgtcggagcagcccttttggagtgggatactcgggtcgatccactgccgacggctgggcagctaaccattgagcgtaaagctcggcttcccacttgagcagcgtcttatcgcgggcggtctcgtaggcaaggacttgccattccctatacttgtcagagtcgagccgcacatatccctcagacttcggcaacgacccgattggtacccacatcacgaaggttgtgtgagccggacagatcgtgagccggttgtcaaggttcgtcagtcggatccgctgcggatgtcccttgtggaaccgcttcaccgtagggatgagcttgtcggtccgtcggatccacggcacgtgagtcgtcggggacggacgtttccgctgcattcggaactctttccattctcggccgggaatctgcagcacgtcgaccgggcccccgttgacgtggaccccttcggcctcgtcgaccatgttctgcgtcttgatcagcgggatcatcacttcgtccgggagcttggccgccgcgttgaagaggtccaaccggatcccagccgggatcatgaagtcggtgcctagcaccacgtcgacgcctgcgttgtggtcgatgatccacatctcaaaaacgtaaacacgctcccatccgagcgtaatcttcacagacgccctccgagtcgtcgtcgccttgcacttggtgataccctggacttccatacaccgaccatggtctggaatgtccttgattctcagccggttggcgtacttctcggaaataacactgacgttcgctccagtgtccagcaggatcctcgttcgcgagtcgttgaccgctccattcaccagcgtcctcatacgtactcgtcggtcgaatttctgcgccgaccagcatcccatacgctctccgggtagaaggcgtacctccacgtcgagtcgtcggcgcgatgtttcctgcactgcactcgtcacccagtcttcggcagtgtcttcaatcacttcttcatcactcttctcactcaaatcacctccaccgaggctttcgcctctctccttttcaaattccgtcgcgttcacccgtgtacctcgtccttcatccggccattcgcacttgcccacaaaagcgtagatgcactccgcttcgactgcaggctcggctaactgtggcagcccgattgggaccaacccagtttcagttggcgggctgcctagtttaaatgttccgtgaagaggaggttctggagctcaggagtgaggtccttcttgttcaccttgttgcgggcaagcttggtgagttcttggaacacttcgcatcggcctgcgtcgtgcacttgtttgcacaacttgcagcgccggttgcagaagtgggccgagtgggagagaccaccacaggcagcgcagggaccgtactggcgtcgtcgattgtcacggccatctcggctctggtatcggttgtcccggctgggttcccgaccactctgatcgcgtcgggaaggccgattgtcggacttggcgtacgtgccgtcggctgccgcgcgtcgttcgctctcgttcgccgcagccacgtagtgatcgctgccatccgttgagtaaccatcgtgtccgccttcctccgagtaccacgagtcatcggagcctcgatcgctggcggcgtcgctgtcatcgctgaactgctggcgcgtactgtcgcgtccggtcgaggtgctcctgcttgcagttcagcgactatgtcttccactgatgcgtcagccagggtcacgcgaggaacgttcctagagtcgtctcgacgacgctcataatctcgttcgcgtcgatccccacggctgtggccagttcgcgagtcatcgcggcggtacccgtctcgggtgtcttggcggcgccggtcatctcggcgacgcgagtcatcgggacgcctgtcatcacgtcggcgggacggttcccgagccttggatcgcgactgcgaagactcgcgcgaactctgtcgctcttcaaccttcagcatttcgatgatcatctcctccagctcatggatgtccttgatccgcagaggagcgagtcgtctctccagcttacggtcgccgcaagtctccaggaagcgcttgacgtggtccttcgccttgcggccgccgttctcgaactggacgcctgcgttgcgggcgtagccgttgagtcggttcaggtagtcgcagacgtgttccttgtcgtcgcgcttggctgagtagtatcgggtttccgctgactggctgaactgggagcagtagtagcggatgaaggcctcgctcagcaaagtccaggttcgcttggtcttcttggtcagttgtcggtgccagtgtaccgcgccgtctctcaggcggagctcgaagggcatgcaccattcattgggcggcgagtgtgtacctttcatctcgtacacaaacgcgcgcagtcactgcatcgagttctcgctcctgttgcgagcgcccgagaacgtcgggatctgccccagtggtcggtgcatcgctacctcgagcctcggcgtcgggttcacggtctctgcgtcgctcacctccccgatctgtcgcagatattcgtccatttgcgcacttccgtctcccgtgaagtcgtcgtcgtcatcggatgagtcgtcggcgtagcgggacttgcgacttgagctccgtccggagcttcatagactgctcctggtcactctcgagtcttcggcaccacgcgcaactcgttcattacgagtcgtcgcgggtggagtgaccatgtgggagtcttgaaagtacggcgatcgctcgcccgacgcactgaacactcctccagtcgcagcccgggctgagtaactgcgctcggtcttcttcggagttcgcgggagcgggacgcgcgctgggtcagcgccgcccttgttggtgcgagccgccttcggctgttccaaagagaagggggtcaccccgaaggctgtacacaacttcttcttccattgccagagctcggctccggcttccgcgggcaggaaactctccagcgtcgatggcgacggggcaagcgtgggccggagacccaacgctttcaggaacgtcaccatgtccttcgccacttgctccactgtgaccgcattcaccggtcgcgccaactcgtggctcaggtcggcccacaccgcttggcggatcatgcgcggctcgaagagtcgaccccactcgctcgcacgcattgcttcaaagcatcggccgagtaccttgttggctgccggtgtgtctccattcatcggcggccggttgcccgaggtttgctcggtcacttgtgtcgtccgcactggcgatcgtgagtcgtcggcgctgtcttcaaactcttccatgtcataatacgctggctcagggccatccacatccttcagctcgcccgcgaggttgcgcgagacgggaggcgcgtcgtcttccaagtcgctcgcgagactgcgcgccagggagcgcgagcccccgctgcgtcccgcgggcatcactgcatcttccggagtctcgggtgtcaccaccgctggcgcaggcgccttctcctccaggtaatcgtcgtattcttcatccatttcttcacccttggcgtcggatccagtcatcgactcgtcgaagctgacgtggcgctcagcaatcgggtcgagttgcggcgtgatcagggccgccgtcgagtcgtcgcctcgcgttccgccggacttcatcggagttgctggtaccgccgattgagatcctttcgccatcttcttgttctttttcttgctcttcttctcagttgttgctcgtaaagtcagttgacctgcagtagcacgagacacagaaggtcacaccaatcccgggtcgcggcaccagtcgtcgtgtaggaacacgcactaaattatataatagcacactttccccaccaacaacacccaccaagtcccgatgactcaatgggcttgttagggttagaacctgaaggcccaggaactttcccttgcaccgggttgacgtttcctctgtgcaccgtgtttccgcttagtcaactgacggaaacccagcgtcaccagccacgagcaaaggctggcacgctctcacacacaatataaacctcgcagaccctcaggaaggaaggatcccagccagtcacggcttgatacgagggtgccggagctatactccggcgggaaggataaatggagtgcgctctcgctcctctactacacggcgatgactcgcccttcgtatacacggccacctcttctcttctcttggcctgaccacgggtaaacgcacgctacgatactagcaggcgcgtccaccgacagtcataatcctaccaacaggtttatccaattgctacgagaactcaccgatagcccggacgtcttccttgagtggttgggaggaaaagctgttctgccattgttgcccaaagggcttatctgttctatcttctctttcctacaaatatctagtctagacgtgtccgttgtggatcttccaggtaaccacccgactcttcagaactctcttgaaggctcggacggcctcccgatgactcgaagagtcgccttaggtgcggaacccaggccaaagttcgccgtaggttcgggtcgtccttgaagtcccggtgttgtgtggacacaccacggcttaagcttgagtgtcgacgagtcatcatcattggtccagactggccaatccgcggccgtcgaacaccatcgaacgaatggcgatgtgcctcgatccgccagttgagtcgacgccgaatgccgcggggcttgccgtgagcttcactcaactttctcgacaccacatgagcgagaagttgctcggattgaagcggctcgtgtgaaggtagtccaaaaagcggaagaagccgagcggaaactgctcgctaggcaggaagcgagtagactccgagagctacgcaagcacgaaaccaaactgcgcaaaacagaagaacagcagcgcaaacgagatgcgaaacttcagccccaggctgtagttcgacgaacgcaaccaccgccagctcaacggaatgcgaagcgacaacgtagcgacgaagactcggcacacgatcctgtcaggatactagagtttgcagacatgtagatgaaatgtcccgagattttgccttgccagcttgccaaaacccatatgttttggggtgtcaagttgggttgattgtcgttggaggcgctcaataatatgtgaactttctagactgacacagctcattcaatacattcgttttgggcgtgtagctttccgatggtgtgcgcacggcttcataattcctaattttagcaacacaacaacaaaatttgtggatttgggtggcaaattggtgccctgtacttaccggttcacgagtggtacaaaggttgcttcaatgtcgcgccaaaaagcgatgttgcaccaagaaagattgcgcgccgggtatcacctcgattgcgcccacttcaacgtctttgcttccatgccattgcgtgtcgtctcctcgccctcatttctccaagaatcgccttgcccatggttcgcgttgtcatcttcaacgccgacacgacgcaccttctcggcagttgagcgcgttttggtcgccgccgggatgccgcactcccccgtcgtgtatctacaggagctcaacgaagacgtgcatgtactcggagagaaaatgcactttgagcacgctagcttaacgtccagtgcgcgtgtgttcaagtttggtcaggtacactagttgctcaagagaatctcgacggtgtggttaaccttaacgcagggggatgcttggcaggcagaggatggcgtagagaggacggtggggcctcgcacgttagcccaggtcggacgcttcgcatcgaacttgattgcgcggcgtgctattgtggacttgccggcttgtgcactaaaagtcgagaatgaaagcgccaccatccgcatgaaaattcgcttggtgacgttaacgaccttgccctttgtccggtttgcagcggcctctgcagcgaaaccgttgacctcttgctcggatagcttacgctgacccttgagtgacatatcccggaaagctatcagctcttctgcagtcatgcgtacgtagcgcggaaacccgtcctgaataagatccagtgcctcttcaacagatagcggaggtttcgggcgtcgagtcttcaccgaaggtgttgctcttcgaggcgtcataggcaccgaagctactgtaggcgtcgtaggcgtcgaagctgaactcgtagctgctgaaggtgctgaagtcgtcgtagctgctggaggtgctgaagtcgtcgtagctgctccgcgtgacgtagctactgctgaagtcgtcgtagctgctggaggtgctgaactcgtagctgctgaaggtgctgaagtcgtcgtagctgctggaggtgctgaagtcgtcgtagctgctccgcgtgacgtagctactgctgaagtcgtcgtagctgctggaggtgctgaactcgtagctgctgaaggtgctgaagtcgtcgtagctgctccgcgtgacgtagctactgctgaagtcgtcgtagctgctggaggtgctgaactcgtagctgctctgcgtgacgtagctgctgttgaagtacgagctgccttcgcggggggtgcaccttgctgttccccccagaggccctcgctgtccctccgacgcttggggataatcttgtcaatatcaggatttgtcgagcgcaacttgccagcggcttcttggacttgacgttcaattctatctaacgcgttccgtgagaagtacaatcgcgaactagttggtaagggtatggggcagttccacagcgactttgagctcgatggctctgaaggtgaagtatttgctactgagagctacttcatcggtaagaagacctatgtagactttctaaaatgcactgagaatgatgttgagggcgtccacaagcgcatgaagggtattccaagcaaactgatcacggatcctcgaaagacctataaagaacttttcgatggcatcgaccaagaatttgacatgactgcagcatgtccaattaagatcgataacaagagccagcgtgtcagccgaagacaagcatttacacgtattgtcaaagcttaagtaatgtaatatagcagagtttagaccaacatggaaactcaatacgtagatgatttcaacgaaacggaagaggcgtatgataataattacgaagaatgcatgcagagcccagttaagaagatcactaaaaaaagagagacgtctctactcgtccggtccgaggggtcgcagccgcaggcgaatgacccctgggggcatttcgccagagcgccagctctatatgaatttaatgatattgctactcgtgctcgtcctctatcgccgaagcaaaaaaagaagtaccaaggacttctgactttgcatccagacaagctgatgtttggaacaattgaagattattgctcgtataaaaaagcttggagcgtaaagtcgtctctccaccaatgactctacgacccctttacctcaaaaatcgccggagagatcttcccagaacgtattgcggtactctgcggagagtattgttgtaaactctatcttttcaaaacatcttatggaaagtatagctaactgcaaacgctaatgattggctaaaatgtgaactaacttttttcgcttccattcctgaactcgacagtcggagcacagcaacgatggaggtgcttctcgctgaaaatgcgctgctacgtcagcaggtccaacagctagaagcccaactcacccacgcgctggcgctgctggatagtgagcgccaagaacgcgctgaagacctccgcagccaccgccgcgagagactggctctcatcaacgatatcggcgggagggttgatggtcttctaaccacgcataatgaaacgaaggacgctatcattgaccgtttggatacactagaaggcaaactcaccgacccagagcgacggattaatcaggttgaaggcgatgaggaggtgattgtaccattcaccatggacggcaatccgattgatttacggaataattttcagaaggaagctacacggtcagtccgggcaaatattggtcgggtacgttcaagtccaagtatggagcttaacaggtaccatcagggcaggaggaagcgggcgcgagaggaatcgagttcaagtgttgcaggtcgaaagtcagccaagacctcatcgaagacattattaaccgagtcctacttgactgcattgcgacgaaagattgaccgagcgcttcgagtatcttctcaccaagaatgtagaggatcgtctcctgatgtaccgcattctggaccaacaagcgaacgagactgccgctgaggttcaacggcagctgaatcaggatgcggagcgccgccggagaaaagcggaggaggaggaggcgatactccaactccatgccgacgaagaagcgaaccaattttggcgacagactgaagagcaggcccgtgcagagcgagaggcagcccggatccagcaacagaatgccgtggcggcggcacgacgcgagctggcggctattcaggaaggtttagctctggctgtacagctcactcgcttggatctcgaagtgcagatgctacggagccttggactagatgatcggagccgcaacgcacgcaatgcctatctctggttacggagcatcggtggattttaaggttgttgctgcgtgcaggcttgtaaggcacaccagaataaaatcttgcaaatcttggaagttatatctgtaaaaatctaatttgtaataaaatagattttacgacgatacaaattcaacctgaggacagcgccggagcactcgtctggacggaagcacaccagtgtagggccagcgtcggtgttgattcgtgcgcgtgtgtgcatcctccccacgtgcttagtccacctcatactcacccgcgtattgtgccgtgttcatcagtgccaagatgagcgtcgtcgccgcctcgcagccgcaaaagacctactcgctggcggacaagaagccctacttcaagcacttctaccccagggatgtggccatcctggccgtgcgctccacggccatgcagggtctgatgctcttcaacgcgtacgtggcgtcgctggacctggacgtgtcggacgaggaggagtcgagcgaggacgagttcgaagacgtggacgccgccgccgaggacaaggaggagttcgtggccccctccatggaggagttcagcctcgccaccgtcaagtccttcggcaagtcgctgagcatcaccacgtacgtgcgctcgctcgaggaggtggcgctgtgcctcttccgcccgcagatcgtcagcaaacttatcaaaggtatgcgagacgatacgcaacgtcgctgaatatgctagcgaggcatgccttttgctgatgttgttgtccgctgtatcaatgtgcagacatcagcaagtcggcgatgcgcaagtactcgcgcacgtcgagtcgcatcgctgcggcggccttgatggtcaaaacgggcatgcgtgccaacgtgctgagccaccttgctattttcctggtggaggaggtgcgttgctatcctttgtcttgttgttgctgctactctgtggtgacaatgttgatctaacttttgaagcacttaaactcaccgacaatgaattgtgtgtcttcgccttgaaacccaacagacgcagcagatcgtggtcattctgtaccgacgcttcgtgtcaaggaaaggaggcaagaagtccaagaacaatctgcgctctatcgaggagggcgtccagagcagcggcagcgacgaggaggaggacacgctatcgacgttcgtcgccgccacgggccgcaacgcatctcgctccgctttggccgtcatcacgggcggcgttggcgcggcggtgggcacgatggtgcgaccaggtatcggcacgatgatcggagggacgttgggcgacaccctcggctacgtgctgttttagacgcgaggttgggcttcgcggggacgaacgaagcagaagacccaccgaatgcataactgcaacatcaatgctataccaagacagccacaggaactccgaccgcggaactgcttgcactctttgcctaccgccctcatatggcttacggacgatcggatacttgccgcatggcgcggcatcaacacacggaagccattttttcgcggcagagttaccggtgcagctcgaaacatccttgttgtccgctggtccgaaatgaatttgaagggaccgttttttatacttgacaagcaaagcgcgacccacttaaatcgagacggagccaacggttcctttcgtggaagttccaatatgcatttcgtcaggttcgtaccagtatccagattacctgctgccgtcattcgcgacggcgtcactgaagtggatatatgccctagtgcaggggggcacttgcggaataaaagaatgccagctcacaaagcaaagagcgcgcgcgtcgtcgacgtgatcgaggcgctctgagtgtctgcccgccgcccgccccgcagcgtagcggcctccccgcagcaccagcgctctccccgcgcctcccagcactacagacgcgctctgctctcgcctcacgtcacctgattacgccgtccagcgcgacttcaaagcccagacgcagctcatgaccacggcgtcgacaatgtacatggagaccgtgtcgctgaacgacgacgcgcccccgtcgtcggcctcggcccccacctcgacggtgctggacgtggactcgctggagtcgcagttctcgcagccggcggcgctcaaggcctccaaggacgccgcgtcgtcgcccgagatcgcggtgcccgtgtccgacagcgatagcgacgaggacggcaacggccagaacaaggacgtgaacgtgcagtcaacgggggccatcaacggcctgagcttccagaagcacgcggacgacgccgtcgtggtggacgtggacctcggacacagcgacagcaacggcttcagcagccagaatggcaaccagcagcaacacgcgctgcccccgctgcgcgtcatgacgcagaagctgcccgtggaggagcgagactacgtggacacgacgctgttctcccccgaggtctcgaggcatgccatggaggtggcccatcgccgtgcaaaagctatcgccaacgaggtcaaggagatgatcgagttggaaggcgaagtagcaggcgccgccaagaccaagatgtccccggccgaagctgtgggcatcattggcggcgcctttgcgagctcgctgcaacgcgccaagaagttggtgaagcctggaaccaaggaatacgatctattgtctgggacatccccgtcggcaggcatgtcaaaactggacgatcttgatagggacggagacggactgcagctgtcgccggatgcaacgcaaagcgacggaaagcacttccgtacgcctaaattgagacccgcgctgaagcggatctcggcgtactcggcggcagctgcgcttgaacctgagaagaagacctcgagtactcggcaacagaagaagaaaggcattcagtggcacgaagacgtgctggacgccgatgaggagttctacgaagacgacagcgaggagcaggagacacgctcgctcatgaatggagacggagatggcatcaacaacagcaacggaagccctcgaccccagatcctcaactacagcagcaagaatgacggacagctcacgcctcgcagcaagaagaaacgcaaaaagctggtcaggaccatgatgcggcgactcacgccgcgcgagaaggaggagctgtaccgacaacgaccagatctgatgattgtgccgaactgggcgcagaagtaccgcgaggagctggcgggcgaggactcgactcgctggaatgcctggctgcttggacttatctcggtgttggctgtgctgctgttggtgttcgttctgctcatcgtgcggcagcgcgccgccgccgcgacttaaatcaaccaagtagccggaccccattagagacgagcggccacgcgggacgtggcctgctcccagtttttgctgctttatgtttggcttgtttgattgaaccttatagcttgacgcgcagagagagcgagcgaggcgagtggagaactgcgctaccagatcacaactacgaactcacattccataaaatatttactgggacgtcagcgcgttttactttatcaccgtcggtttcttcggcttctctatctctttgggaatactactactacgtagtagcatatcttttggagcagtgttcagcaatgcaaccaacgctcaagctagcaagaaacaagcacgcatttcgtgtatttcttgaggggtttgaattaaatcgtcgtcgcgtagaggacgccaaattgcagaaaacgaagagctgggttaaacgagagagacaacgggcccgaaggcagcctcaaagacagcgagagctcgccaatcctggaggtactacaagccacgctgctatctttcctctcttccgtccacgccgcgtcctttccttcaacctacgcgcacgtccccgaggcagtccgagcgcgcctagtggtggctgtggtcgaacttgccgttgacgcgcttccagtagttgctcttctccttgtcctcctgggtggcgccacgcgtggggaggatgccgcagatcacccacgcagcactgaagggggtagaaataaatccatgttaaataagggggtctctctacaaagtggtggaagattgctatcagtacgtacgctccggcgatgaggaagggctggaagtaggagcgcttggactcgtgcaccaggaacttggtgtagggcagcttgtgccatctcacggccttcttggcaacggcggcagtcatcgtgggtctgggggctcttgggcttcctgtggcgacggcgatggctgttgtggcgaaagagaggcccagaacgctcgggggagagcggcgggccaatggataccctcggaaggctggtgcatcgtgttggacagggacctgtcagacattatatggtcgcacttagtcgaaggcagttagaccagcatgacatcaaggcacctgaatgcgcagggcaacgaaggagaagtctgcgtggagaaccaccatgagttgatactgatgtacgaagccaatatgcccttggacgtatggctattttacttctagatgaatagaatcttgatctccgctcgacgcacgccatttgcatacaagtttaaaaagccaagatgcacaaaactcaagccatgctccatttcaagtcttctcagcgcactgaaccacttcgccctagcattgcttgtacttcactcgtcgaccaaataacgccaagaaattggctattgtgcctaagtgcagcgtgtatgaaggaagacatccttgagaacttccataggacagcaatcgttcttacggctcgcaaagacctagcaacgcagcataacaaacacacaagccattccatctcccacccttcaaagtaaagctgtgcaatacgagctctgagggcatcaccgttaagccgatcagaggagttcaggggacttcgcccagcgcgctgcatcatcacctgtaacctgtgtcctgatactcgcccgacctgctgcattcctgcctccttccgcgattcctgaacctgtctcctgtttcctcaccctcgccgcacacacacccagaaacctgcgaagacccgcaacccgcaacacacgagatagcacagacgaagacgcttgccgaaagcctttgatttcaccggaagaatagacgcgcgagtccattacggattaaagcggggtcagacggtcacaacggctggcttgtgtctagttgcagcgctggctaacaacgcacagcttagtagtcctcgtctccgccgaacatgtccatgccgccgcccatgtcgacctcttcctcctcctcgacggccttctcctcctccttggcctcagcgtcggcggcaccggcagcggcgcccggggcagcggcaccgccagcggcggctccgcccgtagagatgagctcgatgatcttgccctccttggacagcagcgacgcgaagagcgtgggccagtagggctccacctcgttgcccgaggcgtgcacgatgtgctggatggcctccggggtgatctcgtgctccccgtcgaagaggatcatggaggcgtacgccacgcaaagctcgtcgtgctgctccttggtgatcgtcgacattcttccttttcgctttcggcaaataaatgccccgcggctggctgcgtccgccagcgcgggcctattggttggcggcgagctgctgtgcgcgtagttcgcgctaggtacgatttgtgtcgagcacatcgatactcgcgtggtccacgtagattggtcgcgcgagtaattacgctttttactcacacgaccttcgcgtcacctgtacatatttgatgtgttgtacatagtgcccaatttcaaacagctcgaagcgcgccatccttccgcacgccgagccgagcacctcgacggcgagaaagagcgtcggcatgcgcgccgccagcgacgccagcaggaccaccagcaagtgggcgtctcgtgcatcgctcgacccgttcgccggtgcgtctactgacccgttggacgtccaaaacggcgccgaaacggccgcgttatcgccggatcaagccgacgacggcaaggagaaccgcatcccgtccagcggccgcaattggggccacccgaacgtctccatgagtcgcggacaccgacaatcactcctggaggcgcagctgctgcccccagagctcaatttcgaggcctccgcgccgctgtcgctgctcgggaagcggccgaacccagacaagcgctcgcccgctgcccacagagcgtcccagagcgacgatgaatcagattctgataccgaacgtgctgcgcggaacccgtgggtagcgtctaatgcggtggcgcacttcgaacagcgcgcgctggagctccatggatcgtcgctggagctggaacacactgaggacgttggctccggctcggccacgatgctggtggacgacttcagccacttgggacagctgcgcttcggcgcggtccctctgggcgagaggaggggcaggcaactgacgctggagaatgccagcgagctgggcaacgctcgcattaaatatgaaggatacactctcgtgcgcgacggatcgggtgtggagaatgcagcagcgaccaagtcgaggtttaagtgtgacttgcacgtttgtgtggtggacgcaatgaagtccgtgacgctgagagtaacgtttgagccgcaacagggagatgtagggcgagaggtgacggccatgctcaggtttaccgtgaacgatcgcttcaagttgcagtgcagagccactgggtcggtcacgccgcgtgtgccgaaggtggctaggttcggacggtcgcgtccctctcgttcggtggatacggtggtagtggtgtcgagggagaagcagacgcggccgcctaggacacctgcggtgaataccagacagatgacgtcggagccgaggagtactgcgttcaccatttctagcgcgttgagtgcgggccaccacgagcccgaacaggagcctgtcgtcgtcaggccgagagcacaggttggcgacaaacgcccctcatcgatgtcgattgagttttcgccgcctcggaacggaccgaagagaaggagaagtgaaccgcgtatgggtatgactagggtattgacgccaaggaaaatcctcggtgccggacaagacccaccatccgcgaagaaacgtttctctgggtcctggtggaaacagcgccaggaggtgtacgacgagaactggatggcaaagcagactgaaggtttcacgaaatggatgaattacgttttattagatggaaccgcacagcgtctcagtggaggcgatgcggaggatgatgccgaggaacagggcacaggagcaaagcgcaggtttgatttctcgtcgctgcgggtgctggctcagaaacgcatggagtcgaaatgggctcaagcagcagttgaattataccattctccaagcatggacgacattttgttcaatctgcaggatgaaattggcaaccaagggctacttttccgcgccgaccgtcctgtatacgcagacgttgggctacaggaagagctcattggcctgctgaacaactatcatcccgtgtggctatgcttgggtctctacgctgttcttggaaaccaggtcatgaggcaagaaaagtgctcgctgcgaacaattttcagcatcactaccgcgaaggctaccagaaaagggaaacaagagtcgccgccagacagaaggatgccccaagtattgcgccggatcattttgaaacatttggtcaaggattcgcatgttgcccaaaattatcgcttggtgaaaaatctgttgacccctatggatggttccactgcggaccgcaacgacggtggtaacgccttcaagaacacgaagaaaaatatcaacggccgtgaatacttcgactcgctgacgcagtcttttatgttgaagttcttcatgctcgtgatctttttggatcgtgcgatcgagcacaaggcagacaaattccctcattttccctgcctcttccgagttgcaccaaccaacaaaaagactacatccagtaaagcttcgagtagcagcaacgtcggccaacagaacaaagccagcggtgctggtgaggagctacgggtgaaaaactcgcaggtgtttgtgaccgaattctgcagactgtttttggcaagcgagggtcgtatcgacaagcatttgaagcaactgggctacacgctgaggcacgaacagacggcattggatgagattgatctagaaatcaagagtttggagacagacatgcgcgatggtgtccgactagctaaactcatggaagcactcacaacctctccgccgaccccttgtacaggtctggatggagagagcgtttccaagccgaagggattatcatccttcttgcgcgtgccagctctgtcgcgcttgcagaaagttcacaatgtggagatctgtctgcacttcttgcaagataaatgcggtgcaagcgtgctggataacctaaagagcagcagtagcaaggaaagcaagcacaaaataagtgggcgcgtgcgggtgtcctcgtcaggatttgctggtttgcgcagcaaggtggacgagaaaatgatcgagaacctggcgaaggacatcgtgaatggtcaccgcgagaagactctcgcgctgttgtggaagctcatcagttctttccagctgcaatcgcttgtggacgcccagacaatgaaacgggaaacagagaacgttgtcaagcggatgagtttccgcgcgaaagactttttcgatcgtcagcagcgaaacgcccctctcgtgcacgctgatgaacacgaatgctacgggttgttgctggagtggtgtcgtgccgtttgcgccaattacgatgttggagtggacgacttctctcgatcttttgccgacggaaaggcgttatgctaccttcttcactactatcatccgatgctattgtcgaaatcggacatgctgccgacaacaactgatttacgtgacgaggagaatatcagcgagaagatcctcttgtcaaatgaacagcggcattttgctatcatcaacgatcgtatcaagcagcttggagaagtcccggtgctaatgccacaacagtacaatacgaagaacccgcccgaagagaagatggtcgtgacgttcgtctgctacttgcagtcacgcttgatggattcctacagtgagattcacgctgcatcgagattgaagcgttggtggaagagcccactgattcgcttgcgattgcaccgaaagaagaacatcagtgcgcgcatcatccagcgattctggtacacgtccagtcagaagcgattggctatccgtcagtgccgcaaactcttgcgagcagctcatctcgtgaaaagcaccttccaaatgtgggtggccaggattcagttcctacggttgcgaagatctgtggtggccatccagcgagcattccgtgctcgacagcaactgcgccttaatggagattcagtaggcgctgttcttgtaattcagtatcgctggaggaagcagctgaagtggaggcgcgaaaaagagcggcgacttcacgagactcggcaacggaaggccgcgcaacgtattcgtgtgagggcaagctgtgctatcatcgaaagaaactggttgcggtatttgtccagggagggagctcgtctggtacgacaacaaatgatcgcagatcggcacctagctgctacccgaattcaacttgcatggaggcaaagtctcatgcgtgctgctgcacgaaagcaacggaagcaggagtggcagctagtgcatcgtgcatctcaagttatccagcgtgcttggaacattttccagtgccgccgcgaggcgacccagcgagcgctggctctacagcgctttgagctgatgatgaaggaaaaggaactccagaagaggcgaaccaagctcaagtacaaggtggaaacacgtgctgcaaagtgcgtccagaaaggattccgtaagtttgcgctgcgtaagagagatgtggcagctacaaaactggcgagcgcattccgtggtgctaagcaaaagctacaattccgcaaagagaagcatgctgctgtggtaatccaacgaaatgtccgtgtttggcgtcggagaagtcacttttcagcgttgacacaattctacagtatgctcaagacgtaccaaagaatgaaggcgaatgaagcgcaacggcgcgcattgcgagctcaggaactgaagtttaaagtgcagacgcgagcagcacttcgcattcaggatctttaccgaagttaccgattcaacaggagaacttcggcagcgacaaggatacagagcttggtgcgtgctcggatcgtgaggagctggtatttgcactgccgtcggagtgcgtgtctgattcagaggaacgcacggatatggcgtcgtcaaggacaggttcgagcattgctggtgttccagaacatgctcttgcgatatcgatgcatgcagcagcaggaaacacagcggcaagaacgtattcgccaggagcggcttcgtcgccttcaggaaagcgtggagcaccgtgcagcgtaccgtatccagtctgtgtaccgcttttatgcttatcacaagaagatgctggcggctacgcttattcaggcggcattccgtggattaaaggagcagcagcagtacgccaaagtgcgtgcaagtgtcgctaaagtgcagcgtgcgatccgttcttggttgtcgatgacaagatttcgacgggctctcttcgtgcaccgcgcagcagtttgcatccagaagtgtgcacacgggtacatttctcgccatcgccgatttaacttttacgctctccagacccagcttcaaaggctgcgggttttgatatcatgctggcggatcgagttctggttcaggaaccgcatgatgaggtaccgtaagaaacgcgctttgattgtgcgggctcgttggacgcgacttcgtgctggaattgtgcagaaacgtacctcggatgttcacaagattacgagaagttggaggtcgttctgcttgaggagtgttattgacgcacggatccagcacaagctacagatgcatgctgctgcccaacgtgtgcaggtgtggtggcttgacctgtgctgcaaatgggcagagcgccagcggcgcgccgaggaacagtatcagcgcgagatggaggcgatggcgatggctatggcaaaggcgcgcgctgcgcgtattgtgggttcgtggctccgccaaaaggtaataataccctatcgggaacgtaacttccacttcgttgcagtgcggaagctccaggcgtggtggcgaggaacgctggtccgggtgcaccacagtacgccagaggtaacgcagcagcgcaaaaagctgtccacgatgaagttggttggccaggagcagcaaatcggtgcgagtacttcgtccagcaccagtctgcaacagcttcgggtcaggacgcacgaggagagaaacgttcagactgagcaaccgcagacgctcggatcacggttggatatggctctgcacatgcttttgcacggcaaacggctacaagatatgctgtttgcaagccacactatcgaagtgtgcacgcggtactcgcgtgagtgctgccgcaagtgcgttcagctccagatttcgtcaacgatttttgcagccattcgtggcttgaaccgcagccgtccacacgtagagcttctccaccagctcctgctggtgctgaagaacctaacggtgtatcggcggtcagcggacaaggtcaagacaacacgagcggttgctaccgacgatgacaaggaccgcctcgacgttgatttgcgtgctttggacaccttggtggacctgctgcacatccaccgcgatatgcaccacgttttcatcctgtcagcggacgtgatcaagtactacctgggtttgctgaagcctctcgctggaaggaatccaaacgtgcaagaaagttggagtgaagccgagaaacgcctgagcggactgcaggagctgctatcgaggaagttggcgctgtacaatgcaacggcctcgttccggcgcgtgaaaaatgttcctgaaaagaacagcgcgaacagcctcatgaggaagatgaaccccaagacagccgtgtccatcatggagcagctcgtcttgctgctggagcggtaaaagagtacgcagcacccagacaaatcgctagtatgaatggtaacgttattaaatatgattatttgcctgaattgaaagcgcggatgggagtgtccacctgtcgatgcactacacagccaacttctagtaactgcgcactgacctttgtgccggcgttgaggcgagcacaaatatcaggcccaggatgttggcatccatgtgatgaactgccatcgactccgccgttgagtgtcgcgcagtgctgccattcatcacaacactgatcagtgcgactttcgcctggattggtaattttttctcgacgaccggcaagaaatctccatcgtgggcggtgagctctctcacttcttcaccaaaattccggttcgttttcgatgcgacgaccagcttcacgaggtgccgtgtcattcgaagtgcggggtttcgcaagcacgctgtcaggtctgacaccgcatcgggccaccagatcgccatgtcctgaatgggccacgccagtatgagccgagaccaccacgtcacagtttgtcgtatggagtctttctagtagcgggcatacgctggccaagacactgagatctacaacaggttggttgtcatccttactcgccacttcagtggacaatctgcgaatgccaccgaaagccaacttcagaagatccatcgtcaccccaaaatcttgaaaaaccaataccaactcgtcacaaaggcgcttctcgtttgggcggagtttcgtcacatcaggcgtgaactgcgtagaatcaccgagtcttgtcttgcaagccccgtagccaggaacaacgagatccacaaagtcgctgttagtgacatcgcaagaagctcggcatcggaaattgcaggatgcaaccagagcgttgctgtcatcagacggagattcacgagaccacagctgtgtgccttcgtcaacatccacggacccgtatacgcggccatggctttgagtcgcactcattgctgttaaagggaagccagtagccaacactgccgcaatagctgacatgtcctcattggtcactgtcattgctcgaatcatcagtttatcgacaacgctttcgggagctttggtgctggtagctctgcagtgagcgcatacattaaccacgaccactcgtcgggcttcatcactgggaggcgtaagctttgcagtcgtgtccttgggtccaccagagcaactgccgagcaaacggccgcataaataaaagcgggtaccgagttgtacggtaaatgcaacattttgcattccgctcgagctgtaatgcgggctgaatcctcagacattgttgatgtgcagagtgaccgaccgcagatcaacgcgcccaggaagaagcctgcattgaccaacactccaggagacttattctggttacaacactccagcttaagggttagattcgaggctgcagtccaagccaatcctgttgtcaccttcaggatatccgacgcctcagcaaaactatgtatctttgcgtctacgtcgtgtcttgaacgcgttaatagagtatccgttgccggaggttgcctgggcatcccatcgctattgtgatagagtgcgagttggacattaacgggagctttcgcctccaaaactcgccgaagttgagtggacgcagcattcaactcaccaatcgtatggtcgaatgtctgcgtaccgcttaatttataagacaggaagttgcagctccactccatcgaaaaataaatgggcccgtatgcttccatcagcttttcataccccatcgccactagtttatgagctgcagctcgaaagtcaggcgagtattcccacgggtcacccagacatccgagcaaatccccccaggtgagtgaagtttcgactgcggcgggatccgatgctggcagagcgccgacgaaccagagattccaagttacggtgcagaagtcactacactgaaatttacttgaacccatcgctagctcggcaaatgcgtcattgtccacaaacaaaagcagcgtgaacagctcaattgcctctcgtagccgacgcgatcgtgtttcatgtcggcgactaccctcatctacggggacctcgagataaactctgtgaagtgcccagtcggtatcatatcggacttggcaagaaagctccacgcgtaccaatgcgttgcgatttttctggagcatgctttcatccaaaacagcacgccaaggctccaggaattcccaattcgatgtcatctgccccccacaaaaaccaaagtgcgagtttccccattgtcgtcgcgcgctgccatgagttatatcatttcatattttgaaatgataccgaggtatgcatctaccttgttgcccgtactatcgagtttcgcgtagtcgtattaatacagtgtagagcaatatcttcagcagggaagggcacggccattcatagcgacatacatgtaactagttgacaactagtctagttgtggttcaaatggaaactagctactttggactcgaaaccatctagcccatacactggcattcaaccgatcgctgcgtcggtgttgatgcgaatacaaagattgagctcagaatgtacgcgtccaggcagtgaatcggcttcgtgctccaagtcgcggccgtgacgacactgatcacggctgccttcgaactcgtagtgagtttttccttgactacgggcaggaattgaccattgtgagccatcacctcgcgcacttcttcctctgcaaactcttcattcttacgcggggtcaccttgagttgaacgagctcccgagccattcgtaactttgggtccctcaaacaccccacaagatcagccagcgtgcaggaacattcgtctaacttgatcgtcttcacagaccaaaggcgcagagctgcttcatgttcagacaccaccaccgtagcatatctgagacagagatacaggagattggggcaagccctagccagagcgcaaaggtcgacatgactcgcggctgtagcgtcctctgcgttgaagtatagtttcagcgagcaaaggcccctcgtgaccagcaccaacacatctatcaacacacccggggtctcgaactcaacatagcgcagttccagagttccactcaatcgtttctctcgaaatttggaccccccccagtatcagccgtgaatcggacgcctctgtcatcaagtttggccttgcaagcgccatatccggggacgacgagattgatccactcgctgtcgttcgggtcgtgaagtgctcgacatcggcaagcactagccacaacagtcgagctacgacccccaccaaatgctccacagagacgcagctccgtgccttcatcaatctcgacaataccatactgctgggagccatttggaccagactgcaacagcggctgaggataattatctcgaagcgcggcatgcattgccaatatgtcagcttgtctcaatgctcccttccgaattttgacacaaggcacacccacatctgaagtcccaccacaaatcgcgaaaataagccaaggccaccgccctgagccttctaaatctatgctcaaagagtctagatgcgactcagctgacaacgccgcgactgccgagcagattgcagtaaacgcccacttacatgtccagcactgcattcgttcgttttcccatttgccactggaatgggattgttcaagtgttcgctgccggtttcagtcacaagacgcatcacgtgtccgcacagcagcgagttcatcataaatccaagattcagcagggcttgctgcgaaatcattagggtagcgttgaggtctagtgacaaatttgcaattgcggttcttgccaatgcgctcaataagtcagagaccccagggtggccccaactttctatcgttgcacttacgctctcacagcggggatttgctgggctccatgtaccgtagcatcttagtcctaggcgtcgttcactcctaagggtcagttgtaaattgaccagtaggacactggatgcctgccaaaagtatagtaaacggtcgacatatctgcagcagatatgcccggcttaaaaaagatatatgtcggcatatcgcctgaaagcttcaccaaaagtgtcttattgcttctgtctacgtccggttcctactgccctgaatcaggtggctacactatagaatatgcagtcacttcgatgtgaacctgtcaatttgccccggacactgaagcggcagcactgctgccgcacttcttctagattccgtcactttcggattcgtgcgcgtcgagcgcaagcaagctcagcgacgatggcgagcgtggacacggacgccttcctcgtcgtgacggacgccttcctcaagcaggggcgggagctggccgaggcgcggcgcgaggtgtaccgcttgctgctggaagaggcgtggcggacagccatgcgaagtcgcaactacctgacggcacagtgcctcgaggcaccatgcaactcggcctggatgcttctctaccgatttgggagcgatgtcaactttataaacgcgacgagtctcaccaggtacatttattgatcgagttaaatgatacaaagctgtatgtagctaacgtgtgactgtgtgctgcagacctgctttcgagcagttgctgcgaaggttttcgcgcttctacttcatccccaaagccaagttgcgcggccgcccgcccaagctacggtaccaccatcaagtcctgggactggtgctctcgttctacgtcggctcgatggagcagagctcgctgtccatgctctttggcttgcccccgagcacgctctcgcgcatcctgtgtcgtgcagaggaggcgctgtccaaggcgctccatgggtatgctccggcgcgcatttcgtggccatcaccaacgcgccaagccgagctggcaagctcgtcgaggcacgcgagcccctcctcaagtacacttttggtttcatcgatggcaagaacttcaaagtacgtatgcagttgtattcattcgatcctatccgtcctaacccatattgttggctatatgctgcaggtgcagcaaccttccaacgcagatcttcaaaatgctatgtacaatggatggctacattctgttttcgttacaggaactatctattttgcgaccgacggctgcattatctggagccgacacaactgcccgggttcatggaatgactcggacacgtcgctcggctttaggttgaagctactcgatccagccttttgcccggattcgaggatgaacgtcgtctccgactccgctttcccctgttcgacagctatggcggggcgcattctcacacccctcaaggacggagacctcgagcggatcctgccgtcgctgagggcatcggcgcgcacccttcacaatgccatcacctcggtccgccaggcggccgagtcgggcatgggaagcgtgcagaaggtctactcgagactcaacctgccactgccgtacgaccccaagctccgaggacttcgcctggacaacttgtttcgcatggccaactccagggtccgaacggtggggatctcgcagatccgaaccacgtttgctggcgagatggaggtgccgactcaggttgcctaagtagtgagcgattcatagcaagtagcgtggcaacaatatattttgcgtggcgtagaatttctcgaagtccttgcaagtacactaatgctgaacagatgatgtgaagttgttgtaggacttgctgatgataacgtggaagatggtgcttatcgcaagttagagatcgatgcagttcagcagcgagcacgacttgaatgaagatgaagatgctgtacatgaaaagttgttgattcaacggctttgagataaatgcaacgctactacaatatgaatgcgccatgctgcgaggtgcagagccaacaactccttccttcgtctccatctttgctaacgcgctcttcttaatggcattgatcagcatgatcagctcctgcgtgcgagtgcgcgcatcctcacggtcgcgacgagctcggtcctctctttcgagtttttcttgacgacggcgtccctgggcttcggccttgtcggcaaggtagcgagcctcttgagtagcgacttcggcgcggcgacgcttgtcctcttcagcgcggcgttcttcggccttgcgttcgttctcctcacggagaaggagaatcgtctcgagcaggcttccgcccgtgttgttcgcagcggcttcgaggctggcaagcctggtcttgagggcagtggacgtcctcaaggcgcgaatccgcttcgcttttgcaaagcttgcctccatggtctccttgtcttcttcgagcgcacgcttggcaccgacggtgtcacggaacgctgtcaggtcctgcccgcccaagcggttcgaaaagttcacgagcttcgggcacttctctgcttcttgactgcgagcagcagcgagcggtgtctgctgcggagccgccggtgggctcgcattggcagcaacggagctgacagccgttcgacgtggtttcggcggcccgcttgccgtacggcgcgtggtacacgttgctggaggaggcgccggtcgtggagtacgtgcaccgtcaccggacccaccactcgtgagtggcgccgcaagcagctcttcaaactcgcccagactaggcgattcggattcggtggagtcgagcccgacggactcgtcggtgcacgtcgacccttcagtgctgggccggccggccgtctgcacgccttccccatcggcgtcgtcgtcgccgtagaagctctcgtcggggtccgcttcgaagcagaagtcgggctcgatggggcgatcttcgtcggcctcgtcatccatctcgatgacgttggccttctcgtcgatcgccagcttcacctccttggccttcttgacgtgcggcggcatgttaggcgtgccagtcggcttcctggtgctgtagagcactttgaatttgcggcggaggctttcaaagtctcgctcaggggcaccgcgaggtctgttggcgttgtacgacgccgctagacgctcccactcgtctcgtccgagcggaagctcgttctcgatcagcagcaagaggcggccgacgtccgccgtggtgtagttggggtttccggtttgtcggaccatctacatgcacaacaagttgaacaaccccatcagcaagcttgacatcaacgaatctcgcgtggggcagcgtaccagggctggaagcgcgcgaaattgaagcttggggcggggcgggtatgcgtcttggaggagggtgctcgttgcttggcaaaagcaaaagtgagagaaacgagtgcgccgagaagcggcggcaactcgaccagcaccatgccgccaccgccaccaatttgaaaaggatgctgctcttagcagcttcaacctggagcgcgcgaaagcttcgcgcccaaagtgccaaacgcagcagcaggaagccggctcgagatctttcgaacgaagccgtcttggcgccaaatcacattcacagtggtcggagcatccccgtagtctggcagcacttcgtccccacaatacactcgattttcaaacaccttcctgcattcagtcgtccattcactcatacatgcatgttgcttcactcgatgctccgcgctccttagcaaccttgctgtgctgctgtcatctcacgggtcttctccgtcttggatgttgcggtggcgacagccgtctcgctcgcaacggcagacgaaccagaggtcgtcatcgtacctcctcgccacggtagatgcgccgcgtcgtcgccgcgaccaccgcccgttcgacacctccctgaactccgctgcaggctcgcacgagtgattcaggaagcgcatcagccctcccatcccttcagcattaatcgcagcgcagatcgggtacgtcggcttctcgggccgctgcttcgtcaggagacggtagccgttgttgcgtgggcggttggctcgagatacgctgacgtgctcgatctcgcctaggtagtggccgagcacctcaccggcgctgatgtcctcggcagcgacaacctcgagctgctgggtgcggaagttgcggccaaggaagatcttgcttgactcctccaagccgttgccgcacttgcccccgtacgggcagcaacgggcattgcagtacacgttgacaagcgcgttgcggcagctgtcggtccggcagagattccagcaaccgcaaaagccgaatggctggaccgctgggaagacggtggccaacgggttctattgctcgcgcaagtgagcaatggcgtacggccaccgtgccggcgcgaacacgtcccccggccgtgacgcctgcagttgagcacggggcgcagccgccggtactgtccgtgtcgctcgtcgaatgtcgtccgtgcgcttggtctccgagcgctggctgcgtggctcatggctgggaaccgtgcgctgggtctccgagcgctggctgcgcggcacatgacggggctctgtgcgctggctgcgcggcacatggcggggccccaagcctggcgtgagtacggggcgacagcggcttggcggcagcgatcttggaggcgtttccaggagcacgggcgaggacgtcgtcgggcttgtgcgcgcccccgaagttggcagcggggccgtcggcgtctctggcgttgccggcgggttcgtcacgcgcttgaatcggtgcttggtccgctctggagtgagccagggcggcgtcgccgtgcccgtcgcactggagccgccgtcagcacccatggcacgggcgctgcggacgttcggcggcgtgttctcgtcgctggaggaggaggaggagttgacgatgcatcggagcttccagtggatcgcggagtgcgtcagatgcaccatcgttcctgctgtaacacacggtgttagccaacagccagtagcacttactgcaattgcagctcacgtaccggagaccgtttgctgtcttcgcgccttcggaggctatttcaaaagtgagcgcaacttcaagttggcggcaggaagatataagcgaggcagtatgtcgcccgaatgacggtagagtgatggtcgacttaaagtatacaaataacaagttaaatatttaagatggctacacgacatattcataggggtagggctgtctatcgacacgaaatctgggcctcgcgggatctatgaccggcatatactccgcatatctgctgcagatatgtcgacggtttgatatacttttggcaggcgtccactgccatttttaacatatggctacattacacatgattttatttttaagctctattccgtttaaaacaaggcttttccagcacactcgaagcatgaatcaagggaaatgacaagaaagggaagaaaagcaagacgtacctacgcatgccggtagacaacgcgcagaagatgaaggttctcggtagtcggctcaaagtctctattggatgttatggtactgggtgctcaatgacgttagatagttggggacgctcccatcacacgtgcgtagcttcttggagcagccgctgatggagagcaccgcttggtactcgaccttgaggccgtggcctggcgtctccttcttcatctccttgttcatgctggcccacgtgttctcgctgctgtgggtacggccgggcacgccgctgctctcaaagaagtgcgcgatgctcacagtagcggcagcaccgcgaacatgtcggtggcggacgtgacgacagcgacggtagcgagacgaataattagcagtgcaagctaatttgaaatacacgctttgttgtgatttgcaataagtgcttgtgcagtgacgcctaggactaagatgctacggtagtcagaaacgcggcggcatctcgagtagcacacattcgcacaattggaggaacagcaacatcgaatagacctcgaaattgactccgacttgtgcttgatggttcacccaattgttcagggtattggctcccatacagttctgaatgctgaaggcctgcctgcaactccagtgaatcgcagccctcccatcaacccccttcatagtagtggtagactcgccaaccctcaatgcctccaatttctgcgctgcagcttgaaaaccgggcgaacattgcaatggattatccggaaaccaaaggaaagtcccctacgtgacttcagtctgagctgcagcgacgtcttgaggagacagagacccagccaacaggacattccagattggagggtaaatgatgtggtcatccagccatgctaccgccaaagaaaacaccacctctttgaatgcattaatgttcacaatcgcaagcagtgtgaacagctccatggcctcgcgaagccgttgtagtctcgcggcatctcgctggtcgccgggaagcctgaggtggatcgttggccacttggagtagtagtttggctcggtaaacgtaacttgcagagtcggttcagctgaattgacattttcttgccgtataatgctctcgtgcaatacgacccgccaaggctcgaggaatccccatccggccgccatgacaccggcgtagaccgagtggtaacttgaacaaatttgcaatggatcgactgtgcgtggtctagatatgtcactcgatccatcaatcagtataacattattcgcgcagccggtattactaacacaacaacaaatctagggtacccaaattgatgtgtctggatagatagatagaagtacacagttcacgaccaccaatcatttctgttgggaaactcacacttgggttttagcggaggagaacacagcgagaaaatgatgtctacctgggaattcctgcagccttggcatgccgttttacgtgaaagcgcggttcagccaaattgcatcgcagcagacgcatcggtgcgcatcgaactttgctgcggagtccgagtcaatgtccatacagcggctcactccattttaatcgtggtcctcgtagaggaggatagtcgacgactacgagaagcaatcgagctgttcacgctgctctcgttcgtggacaacgaagcatttgtcaagctaacgacttcacccgggtatcaactaaatggcgacttctacgtggcaaagtggcgcctctttttcctcggagctctgtcagcatctgacgccaccgcgaccgaaacttcactcacctggggcgatctgctgggatgttataaggacccgtgggaacactcgcctgaatttcgagatgcagcgcacaaaatagtggcgatggggcttgaaaaggcggtgggagcttttgagcccattaacttctcaatttggtggagctgtagttctcgggctggtaagcttagtggtacacaaggatacgagcagtcggttggcgagttgaacgcagtttccgctaaacttcggtgtgttttcgaggccaaagctccaattcgaagcagggaggctagatttcagctttttgggcggcaagtcccagcgattgctactcaataagctaaagggaatctggatgggaacctggaaattacgaatttcaaatcgtcgccccatatcctggcgatgactgcaggattggcgtggacgtcgatgccaactttttttataatgttgaagtgccacgatgggatatccgctgataacggtgacgtggcggatcctcatgtagtgcaaaatgccggatttttcttgggtacgttgatctacggtcgttcactatgcctgccggcagcgcgtgatggcaactttactatagttccttcccgagcggcgtatggagagatcaagttggtctgccattcagtgagcgacgatgtcttttctccgcttgttcggctgttgccgagatggattcgaggccaacgttgactagcttgtgtatgaagtggatgacctccaagcggtggccgtggttgatctattgccttcagtgcagagcctctggcattggagccaccgacaccgccgtctcaaccctgacgattcgagagaaccaactgacaaaggcggacatgtccgctattgcagccgtgctcgagaccagataccccttaccagcaggcggagagggcattgcgtacgggtttgcgaatgttgaggaaggagcacaactgtggccgcatggattgcctgaacacgctaacaacgccctagttacttcgagtaaatttcggtgcagagcatcgtacgacgcagccactaacggggggtttgtcgatctggttgttcctggttacgggatctgcaagacgaggcttggcgagtccacgcgattcatacccgatcggacttcacctccacctccagtgaagaaaaatcgattctgtgagggcttggacctgtagttcggctcgattaacgatgtggaattgctgatgggtctactgggtctgtgctttcgtgatattcgacgtctatcaattgctgggggcaaaacggaaggcagccaacctgtcgtagatctcagcgtgctggccgccgtttgtccgctgctggaatcacttgacaccacgtattgcactgtggttgcctcgactcataacgaggcattacgcacgtggccaattcaagagataacagtcatgtgcacctgcgtcatgtcggacctggcagcgtgcttgcggaacccggcgctttgtgacgcggacgtccgtctgccaatgagatggcagaggactcccacgtcaagtgctgctgcacagcacttcagtttacgctggacagcgtaatacggggatgcatggtttatattcattatatgctatcctattggctggtgtcaaaagtaaacttgattatgggacgcgtaaacatggacattcgcgcgacctcaatggctgtaaatccttgatatgtgcaacaatcaagttttccagccggacgtttgattatgggacgcaagtcacaaattttggccaagctacgaataggattagtagtttttcattggtagataaggattgatctaggatttgagattgatagactttaggatgggacctggatacttgtttgtgtgtcctggtcgccaagaactactggttgcgcggcggcggcgcaccgacgctaaactaacggatcaatcaatcacttttcaactttccaacttcctcttaagtgttcttcgagcgctcgccactgcgctcatcaagcttcgggtcttcgcatcggcttgtgtgacatggtagcacttgttggtcaagcttcggttcaagttcaagactaggttgctcgtggggataccttccgaagcgagtttacctgtgactattggagctagccacatattgggacgctctaggttgcgaacgtgcagttttcggtgggagcacacttcgaagaagtgggtacatcacgccgtgggcaggtggaaataccacattggggcttggcccacgcctagaccggatagtacctaacctttggggttgtgttggactcttactagaagtcggttcaagcgcgtgacgttaaagtatcatcaacgtctacgccggctcctcctcttgttacggctattgacaccgatctcttcttctcggcggtcgaggcggagaaaattgcgaatttgcaatcggatcttctcaagcaggtcaaaacggctaagagggtcctagttaagttccgcaaagaggtctggggtatcgaggacggcagcgttgagggtaaggtcgatcggcaactcaacttagctcttctcgaccttaagagctgcgaggacaacattgctgcgaagattaacgggcttatccgcctaaaacctcagaaacacttagctttaaacacacttttagcttcacttcgtctccgttttattgtaccgttttacggatcactcaccgaaaagtccatctgctcgagacataatgcctgtgacaaggagtagggcgggtgagagtgaatcgcctaacccgcagcagcgtcaagtgccgcggacggctcaaacggaggcggcaacgccacaagaagcgcaaagtgaagccccatcggcggggacgacaatccctgcgcctgagtcaatgtcgatgcagcagttgatgttgtggattgcacagcagcagcaaatgtatcagaatcagatgcagacccagttacagatgcaaatgcaacaggccaacagtcgttttgagcaactactggcctcgcaaggtgaacgacgaaagaagaatcctcccacgtatgaagggaaatttggcgaagacctggaactttggatttttgctacagaggagtactacgctaacaaacgaggattaatggaggccgatacgtccgatgttgtgaccatgatgtcaagcagtttaggcaagtctgtgctgaactggtatcgtgccttttcgtcggattgtgatgcggcggggatgccgaaatcatggcaactgtttaagggaaagttgcgcgagcgctttcgcccgaaagactttgaatacaacctgcgtgagcggttgtttcaactgaaacaacacggaactatccatgaatacgtgtcgtcgtttcaggatttgatgtctcaatccgagttggacatttcggaaatggagaaacgtttctacttccagaatgggcttcgtgcggagacggctaagaaggtgaaggaactcagtccaaggttcttacatgaggtcatagagattgcaacgaactttgagtttgctcactatggagggctatcgttaaaacctgcagtgagtcattagccttcgtcgaaagcagtttcgtctgtgaaaactgcggctaacagtacggccaagccacaggaacgaaagccaccttcgaagcgtgggccgaaagaggattggctaaagtcagccacttgtaacaactgtggacaattcggccatatcaagccacaatgtacgtccaccaaggagatgaaccactatgttggcggataattctatgctattttggaagtaagcgctttagccttcaagcaggatgagacccccgcagaagtttcgatcttcgtcgacaatggcagcagcctcaacggtgtcacggaagcgttagccgagcgactacaattggaaatcacggagcatcccgacgacatgatgacagttcgtctgggatacaaccaaaccgtgcaaagaccaagacgtaccgtcgaaatgatgctacagattccgaatttccccgtgacgtgcgagacttttacagtcatgcctgttccagaagacaaggacgtgctcgtcggaatgaagtggcttcgggagaataaccctgacatcgactgggaacgcttactattgcgtccacgtaatggggccgaggaacccctggcccatcagttggtggtacctaaccgacctcccgcacgtatgattggttggcgtcgtttcaagaatgcaaaccagaaccgtggaatattccattgctaccggcaggatggccacaccggtgcgttcggagaaacgaagctgatctcaacgaagcaatttatgaaagaacttcgcaaagggaagggtattgaagctgtttttgttgtgaacccgcacgactcagaaaaggctgagcgttttaagcaacaaggatgggaggcgctagtggacaatccggcatatgaagttttgctcaagtaccgcgatactgtgtttcgcactgagctgccgagtaccacacttcctgtccgcaagggattgagcacgaaattcagcttcagccgggaacgcaaccgatttcggtggaacagtggcgccaaagcccagagcagcgcaaggtcatccaagattggatgaaggagatggtacaggctggaatcattcgccctagcacctcggcattcagtgccccaactttttgtgtcaagaaacccgtgggttggcgtattgtgcacgactatcgccagctcaacagctctaccattttgccggccatacccatgccgaggaaggaagacacattcgacgcaatggggggtagttactggttctcctgcatggacctcttgtggggatattaccaggttaaacttcgtgaatctgacattccatttactgctttttcgacgcccgatgggctgtttgagtatcttgtcacccctatgggtttgagcggtagtcctggcacttttaaccggttgtttcagcgggtgtttagagacctacgcgatgtcatgcgcatctactttgatgacatctatgttttcactcaagacacagatgttcggacgcatgtcgaagcgttggacagagtactccaacgctgtcaagagcagcagctgtatgtcaagttgtcaaagtgccagttttgtgtcgaagagatcccttgtcttggtgattttgtgggccacaatggtgttcgaatggaccctgacaaagtgcgtgtgattcgcgagtggccgattccacagacaaagaagcaaatggaaagcttcttgggtactacggtctatgtctcgcgcttttgcgccgacttcgcgcaattcgcaggaccattgcatgaaagtactaagggtttgcgcccaaaggaaacgctgcatttgtttgagcaccagttgaaatgttttcatgaactcaagcgccgtctctccacccctcccgtgttgcaacttcctgatttcgaaaaatcgttcggtattcgtatggatgcctcgaactttgccgtagggggcgtcttgtttcaaaacgagggagggctcgagcatccgatcgcattcactggtcgtaaaatgaaaccagcggagctaaactacccagtgcgcgaacaggaattgctggctattatgcatgcgcttcgggtgtggagagtctacctgctcgatcggccatttacggggagacagaccacaagagtattgagactatattgacgcagaagacaacaaaccgtggtgtggctcgctggttcaatgaactagccgagttccaaccacagttcaaatggagtccaggcgacagtaaccaagtgtcggatgcagtgtctcgaaacccactctttgagcacaatgccgctcaggttagtctcagtgagctcattgaagcggctcgaaaccgtgaaattgtagctagcgtccaaacgaccagtgcaactgtgacgcactcggccaaacaactgtactctacagaccgaagagttcaggagctgttgcagagtatcgctagtggtaaagaggtaccacgctactctgtgaagaatggactgctgtattaccaaacgagagatgatgaaaatgctcgactggtaattccgggcaatgaagatctgaagaaccgtgttatttgtgaaaaccacgatgtggtcacggcaggtcaccccggatacttcaagacatatgtggtgaagcaccgaacaagaatttccaactgcgatgacatcaagcgacacggtggcagaacgataggcagggatcaggctgcgggtcgcggatcaagagggtctattgagagatctcaagcgattggataacgtcgacgcgtaaggcaacacatatgtcaagacagattacgggcgatcgcgctttgactgcggcatgattcgatgtagacccaagcccggatcgacgaccaatctcgcagatctagggcggccgagaacagaagaggacggatcggcagcgcacggcaactcgcacaggtcatcgatcgggagttgatcgccgatcgccgatcgggatcgatcgtggatcaggaggcgatcgtggatcgccgatcgggatcgatcgtggatcgggagccgatcgtggatcgccgatcgacccggatgggcacatgggggcgaagccagggcaagaatccagtaatcgtttggttgtaggatggtagatgagatggcagcggtagagagagaccagctaaacataaatcagaacgcaatttgcacagaagaccacaagtgccctcaagtcgtcaagtcccaggagctacattggcctcggcaagcgttgactgaactagcggtacggttaagactggattaatacattggccagcttgacctactgtagtgatctttctctcgtgtgcaagtcctcgatcgaccggatactgcttggccggcgatcgctgcgtctctcaatcgacctcgatcccgctataggaagcggcaagcaactcaggaaaggaaggaacacacccggaaaggcaactagaggccttggatctactccaggccgaccgatcgaagcgaagaaccctcgatcggagcgtatactcggacgcagagcgaagactaccgcgctgctccgcaaactatccccgcgtcacgccaagacactcgatcttcaccaggtgctgcatcttcggagccccgagagagcagatccagcccgccgacgggtacacaaggtgagaacaagttcagccgatcacggatcgttgggggaccccctccgttagtcggtgtccgggcgctggtgggaagctcgatcaggccttaaccagattttggccgatgccgctaccccacaatggtgcgcgtgcccgaatctcttggggactccggatttcaccgtgagtccgtagaagatgcgcaagtgaagaaagaaccaggggaagaggcgtcgtcggatatcggatcgacgaagacgctgctgaacaaaacgagatccgcggatcgacagaggacttctgtcgacggaatcgagggcgatctggagacagatctagaagacaaacctcaacatcctccccaggtcccttcggggaccccggtggatcttggtgcgaaccgagattcactaacaaaacaaactaaggcgggatcggaccgatacgcgttcgctgactcgccgatcaggctcgatccgggctatctggacgcgatcgcggacaagacccagatcgtgaggaagaagctgagagcgccaggcttggacgacgaagatcccagaccgtcggcgctcgactggtctgaggctgacctggatcgtcagtattacttgaaggaactgcgagatttcttgcgtcaagatcctgtcatggtgatcgtgcggccagagcagatcgacgacccgaagggcccgatttcggccccccgagtgacggataacaagctgatggcggtgaagaacctgctcgggctgttgaaggaagccggcttcgtggctggcgcctttgaagcgaacgatcttttcgatcaagatctcgatgtgatccagacagcgatccagacattggtcgacaagttgagacctnnnnnnnnnnnnnnnnnnnnnnnnnnnnnnnnnnnnnnnnnnnnnnnnnnnnnnnnnnnnnnnnnnnnnnnnnnnnnnnnnnnnnnnnnnnnnnnnnnnncggatacgtcgtctgaaccccaacggatgtccctcggcccttcaggatctgcgatgttggacgcgcgatcacggagtcaacgtcaggaacgcatgcggtcaggacctcggaagcagaaacccaagtcgaccgatcggaccaccagtgccaccggatcagatgagtcgaatggcagattggagtcttactttcaggctgcgatgactcgatttctgaaggaagaacaggccacggtggtaacacctactccagtggtcgacgacaacgttggatcgcgggacgtggagacggaatcagccggatcaccggaccaagatctctcccagtgggaatacgatccggacgatattgatctaccgagttcggcccctgctgcggtggccaccgctgcctcgggatccactgggtcctccttgatccagcacgtgcgaatctccgcgatgtccgatctcaaggagttcagtggcaaggatcaggacgaagatcgcgcccgatcgtggatcagcaaggtgaaatcgacgttcctgctagatcaggctacggacgaagagaagtgcttgaccttcgctgatctactgacgggcccggcgaagaactggtaccaccagctgggccgatcgacgcggaacaagtggagcgatctactccggaatttccagatccagtattgtggcctgggagtatcggtcgcttggcagtattatcattctcgcaagagatcggatgaatcgccgttggagtacctctatcgactgaatgtggcggccctacgtgcaagattgaagatcaaggacggggattccaaggcccgccgagaacatgtcaaacactttatcgagacactgggcgatccggagctggccgatcagctcaccctactccggcttgcggacgcggaagatctggaggaagtcctgcgcgctcgagagcgcgcgaagagtagacagcagcgatccgcctttggatcgaagtatcgtcagaaagttccgacctcagcaccagctgctgcaaccaagcgggcagtgcgtgcagtgcagatcgcgagccaggagtctggatcggactcgggatcagacggatcggactcgggatcagacggatcggactcggagggtgatctacgtcgcgtttacctagcatcggccgaggacaagtcccgcaacgctgggggcgacgcgacgaagccggatcgaagcaaccaggcgcagatcaaccatgacccacctcgatcggatccacgatcgcgatcttcacctgacggatcggagcgataaaccgctgctcacattgtggatcgcggaaacacaccggtctcgattgttggagacgtttgacgtgcgagaagtgtggcaagagaggtcatccggcggatcgcttcctgtttgtgtgccgtggatgtggtgaactacacgagatgggcaagtgtccgatggaggaaatctacaaccagatccgtcaatggttcaacccggtgaagcacgctggcatgttgcccgcgatccccgagaagatgttaaactaggacgctcgccgggttggaatccggtacgagccgagcgttctaggtactgcatctatgcattcgtgaacaagaacacggtagatcgagtaagtggacggactgatctacgcggtaatacatgtgatctgcatgcgaaatatgccgccaaggtcttaagtctacatcgatcggacaacttcagccgttctgacgccgaagtgcccttggatctccagtttggagaaacgcggggctattggaagcaacgcagaccggaggaatggttcaacccagctgatggcgaagtgacgaccgagatcccggagcatgatcgcgatcgaagtcggcctcgcgtcagcgaacaccgcagatctggtgatgtggtgccctatctcctccctggggagtccagagggtactggaaacatcattcgccaggtaagtggttccgtcaggccaagatcactggcaagatcaacaatgagaagttgatcttactcttagacaccggcgccgaagtgtccatcgtggacaccgcctttgctcgtaaggtggggtgctatgtcgacacgagtcagagccaggaatgtgtggggattggcgaaagcgtgtacatgacggaaggaaggaccaggatcaaggttacgctggcgagatcgctggtgtatttcttcgatatctgggttggggatctatcaggacaagaggcgatcctgggtatggacttcatggttccggcggggatccgcctcgatcttgcggacggctctatctgtctccccgacaaagtcaagatccagcttagcggacggcgtcagctgtacaacgagaatgtccgacacgtgtgtgtggatcagggaatgcagatcgcgatcggggattcgatcgagcttccgctacaaatgaaggtgacggatcgagaaaagctgtgggtcacccgtggagatcgctgggtgccgaccgtggtccgatgacgcggcaagatccgatatctccaggttaccaacaacagcgacaaagacctcgtcatgcatcggaatgaacggatcgcgatgtggctggctggagatcggataccccggatcccaggatatgtgtcgatcggatctcgtcgatacatggaatggcagaatctagcctttcaagccacgacagatgaccggccgacgaaccaggaggcaccaacggggcctccagtacctgccgtcgagcgaccgatttatccaacgccccgagccattctccagagacgcaaggtattcccgatcatcgatcagtcgacgggtccagccgatccaacaagcgaaccggaggtaatgagccctgatccgggggcggccgtcgttgatacgcttagatcaggaggcagaccgttgcaggacgattatcgcgtgacagaggagtcgaggtcgtcagcttcaactgttctcgtcggagatccaccagacccacggtcggatccggttgagtcggtgtgtgaaccttccggatcggaggaggaatgctctccaaagcaaaaacaggtagggctggactcccagccttcgccgatcacggatcaagcgtatgcaccgatagatgacgcgaagccgcaagatgatcgtgctggcgatccagagaggaagccagaccatgtggattcctgtggtaaagcagctgagaagggcgaaatcgtgtcccctcacttgccatcggccgatcaggtcgacggttgtgccgtcgaaccagatcttgggggcgggagtaccgatcggacacaccctgtggctgtcttagctgtggaagagtcgagatcaactgacgatacagcagtcgatggtgttcccgcatctgaacaactgccgcaagtggccgaaaactcatcgatcgttggaggtgatcaggtaaaaattgaggccacacccacttcaaatcgggacgatctcgttgcgtcagaaccagatcgagacgttggtgctgatgatcaggtccattaccacgagggcgggaatctgtcagcagaagatgtcgaaggtgaattagctgtgcttcctgaaattgtaatctcgacgacggatgaggtgaagatcgatgatatcaaggtgggagatctggagttcaacaccccggaggagatcgatcggctgtgaaagaagatctggcacaggaatcacctgctgatcggcaagggcaatgcacttcccccagcagcccggggcgacgtgggcgacgcgaagccgatcgctcaacgtgtccggaaagttgcccctcagttcgtggagaaggtgtccgagctgatcaagggattattgtcaggcaagatgattcggaaatctcgatcaccgtgggcctcgccgatcgtcgtgatcatcaagaagaacggcgtggatatccgactctgcatcgattatcggctcgtcaacagtctaaccaggctgaaggtatatccgatgcccttgatcaacgatttgctggaggatctggataaggtactctggtattgctctttggacatggctagtggattctgggtggtgacaatgaccgatcgagctcgtgcgatctcggtttttatcacccacatgggtctgttcgagtggaaccggatgccgttcggcttgaagaacgctcctcagatctaccagcgacttctggacgacgcgttgtatgggttcaccaggatcccgcgatcgtcagactgtgaagtcactacggacttgatcgagtcagatgaaccagaagatccggggcgtccatcagtgctaggtcgcagatcgtacatcgatgacattgttgtgacggccggatcatgggatgagctgtgcgatcgtgtggatcacctgctggacgcttgtgataagtggaatctctcgatcagtgtggagaagagctcttgggggatgcgtaaggtggactatctgggacatcgtgtgtcgaacgacgggctagaggccaatccgaaggatctcactgcgctgactgatctgccgttccccggatcgctccgatcgatgcagtcattcttgggcagtctcaactactacagttgtttcttggaagattacgcgatctacgcggcgatcctgtatgaactgcgcgaggtggacttcgccgagctgaagaagcgccctgatctgcgccagatcctggatcgtcaagtgccgaactcagtggatacggacccagtgaatcccgatcggactccaccagttcctgaagtcggggtcgccgatgaacgctggatccgtgctcatcgtgccttttcgacactgaagatgaagatcgcgacgacaccgatcctgcggcacttcgatcgcgatcggactccggtcgtgattgtgtatgcgagtgactgggcgatctcggccgcattgacgcaggagcacgaccagatctatcatcccgttaccttcgccagtcgaacgctgaagtcaaatgaattgaactacaacgtggtggagaaagaagtgctggcgctgttacggatcctggacctgaactataacatgctggttggacgatcgatacgggtcttgacccgacactcgacgttggcgtggctgttccgatcacccggccttcaaggccgattgggtcagtgggctgcactcctatcgccctggacactggagatcacgaagtgcaccaagggagaggacgagatattgggggcgatcgccgctagtattacgcctcgatcggatatggacgacgcgttgatcgcgatcgcgccgaagaaagaaccccggcggaagattcatgccccgatcccgactgtgcgtgcgaacggagagctgctggtgataagtttcgatggatctgcccgcgtcaagcgaggcggaggcgcatacagcgcgatcttgtggaagttacccgaatggagtgtggtgaaggcccgagcggactatgctgaagggctgactgtaaacgaggcagagtatcatggtctgttgttgggtttcgacctccttgacggcatagatcaaggcaggatagtggtctgcggtgattccaacctggtgatccgacaagtacggggcgagatcgactgcaaagcacctaagctgacattgttgaagcaaaaggtgctggatcgactacggaactggccagatcacgagctgttacatgtgaaacgagactggaacggaagtgcggacagcctggccagtgcagcattccatcgtgaagggggcgtcgtcgtcgaggaggatgccgatcatagggatctagtgacaatgaaccgacttgatgagatcctggtcgcccggtcggatgagtcgatcgcctgactatcgccgatgacgacccgatcgggcaccagatcatggccgaacccgaccgtcatgcaggaggagttcgtgcgagggttgcggatcgatcggattcgtcgagcacaggatgaagaaatgtggatcgcgggtatgaagaagtatctgatgggagatgtggctgatctgacacaggatgaggctcgatcctatggcaacctcgtagcggactacgagatcgacggtgataatctgctgttctattgcccactctccaagcgatcggaggcagatcgagatggactgctgagactggtcgcaccggagacgctgcatcaagacatcctgcatcaatatcactccactctggaaggtggacaccaggggatcgggcgtacataccagcggatccgcgatcactttcactggagaggtctcttcagaagtgtgcagaagtacgtcggcgaatgtgtcgactgcgagaccggcaaaggacgacccacgatcagggggagtcgccgggaaacatccaggcgacatacccgttccagatcatagcaatggatcacataccttcgctacccaagtcgtacaagggtaatacggaactgttgatctgggtcgatctgttcacgggatacgtgatcgctaaggccagttcctcccgaacggcgcagacgatcgccgaatcttacgaagagtgcgtgttccggcgatttggtgctagcgaggtgatcaggcaacgatcgagagccgggatttatggctgacgtcttccgcgcctttaacaagatcctgggtatgcgccagcgagcgaccatggcatatcgacctcaggctaacggtactgcagagcaaatggtacagactgcgacgagagccctgaagatgttcgtggaggatctggatcagagggattgggatgagtacgcagagcgattgacattcgcgatcaacacggctcaagatcgggtccgtggggactcccctttttatctggtgcatggttgggatcctcgatcgacgctcgaagcgacgataccttggggtagtactcggactcgggatcggaatcctcgacggtggcgttatcggatccagaggcactacgatcaggctcgaagtcaggtgaatgctcgcctgcgcgaggcgatcgcggatcgggccgatcgacacaatgaagaagttcgaccacactcgatcgaggctggatctcaggtgtggctgtacctggatcgtgtgaaagaggggtatgcccggaagctagctcacctgtggcacggcccgttccgtgttgcggagaaggtgaacgagtacacgatgaagctccagatcgccggtacggactatcacctgttcccgatcgtgcatgttttgaagctgaagttggtcaaggacttccccgatcgaccacagatcgcgctcacggtggacgaagcagatcgacttgatttcgacgaagtcttacttccggaggacagctgggccccagatcgagactcgaacgagtacgaagtggagaagatcacggatatgcggacgggccgaaggacgcgatacggccggacttatcgagagttcctggtacattggaagggttacgacgagcctggctgggtcgacgaagctgatctcaactgtgaagctttgttgcaccagttccttcgagattgcgtgaaccggaaccgatttggcgcgatgcagtctcacgaagaagagtgagatcggaccgccagggcgagctggtcgccttggtgagcgaggtgagtgacggatcgacggggaggccgttgatcggaggaaggggttttatattcgatatgattgtgtgcatatgaatgcagatcggatgattatggagcaactacaaggcgctacgacgacggatctgggctgatcgggttggtggcgaaaggtggtatgacgatggatctggactgatcgggttggtgacgacggattgacttgagagaggtggccaacagtgacgaaggttacggtggtgtttattgatccgagactttcatgatacgaagatgcgcgatcggcctccaaaaatcgaagatttcacgagagacgagctgaccagctggacgctgaattcgatcatccgagctgggggatgctgttgttgctgcagacactctgtattggggataagttcgttgaggagacacgcgatcggctgttccagatgatcctggggcggtagcaacctttgggtcctgccggtgatcgtcggtgcccgcctcgatcaagcggagtaataggtttcacgacgaagtgtgagccgttgatactgggatggtgaagtcttatctgcaatgagccgccgtgcggcccgacttacggacagggggcggttgtggtgaagcaccgaacaagaatttccaactgcgatgacatcaagcgacacggtggcagaacgataggcagggatcaggctgcgggtcgcggatcaagagggtctattgagagatctcaagcgattggataacgtcgacgcgtaaggcaacacatatgtcaagacagattacgggcgatcgcgctttgactgcggcatgattcgatgtagacccaagcccggatcgacgaccaatctcgcagatctagggcggccgagaacagaagaggacggatcggcagcgcacggcaactcgcacaggtcatcgatcgggagttgatcgccgatcgccgatcgggatcgatcgtggatcaggaggcgatcgtggatcgccgatcgggatcgatcgtggatcgggagccgatcgtggatcgccgatcgggatcgatcgtggatcgggagccgatcgtggatcgccgatcgacccggatgggcacatgggggcgaagccagggcaagaatccagtaatcgtttggttgtaggatggtagatgagatggcagcggtagagagagaccagctaaacataaatcagaacgcaatttgcacagaagaccacaagtgccctcaagtcgtcaagtcccaggagctacattggcctcggcaagcgttgactgaactagcggtacggttaagactggattaatacattggccagcttgacctactgtagtgatctttctctcgtgtgcaagtcctcgatcgaccggatactgcttggccggcgatcgctgcgtctctcaatcgacctcgatcccgctataggaagcggcaagcaactcaggaaaggaaggaacacacccggaaaggcaactagaggccttggatctactccaggccgaccgatcgaagcgaagaaccctcgatcggagcgtatactcggatgcagagcgaagactaccgcgctgctccacaaactatccccgcgccacgccaagacactcgatcttcaccaagtgctgcatcttcggagccccgagagagcagatccagcccgccgacgggtacacaaggtgagaacaagttcagccgatcacggatcgttgggggaccccctccgttagtcggtgtccgggcgctggtgggaagctcgatcaggccttaaccagattttggccgatcccgctacaccacacatacttaggcgttcagaagaaatattactggcccaagatgtcgaagtgcattcagcgttatgtgaactcgtgcgagctgtgtcagcgaaacaaggcacgccaaacgaagccgccgggactactccaaccgttggagattccaggaggcagatggattgatgtgacgatggacttcatggttgcactaccgaagacggcagccggaaaagacgccattatggttattgtggaccggttgacgaaacgtgctaagttcattgccacgaacacggcggcgacagcagaaggactgctgcgctattcatggtcaattatgtgaaagaccatgaagtgccgaagtcgatcgtctcagaccgtgactcgaaattcacatcacagttctggcaggaggtgattaagacattagagacaactcaaaacttgtcgtccgcctttcgcccgcaaacggatggtcagaccgagcgtactaatcggtttattgaagactatctacgaggtgtcgtgaatccattccagaatcattggggtgaatacgtacatcttgccgaattcgcgtacaacagacgtgtccattcctcgatcggtatgtccccgtttgaggctgatctgggttatgtgccctatatgccagatgaggtggctggggacccagagtttgatcagttgcagaagtcagcacaagatttcctgctcaagcaagacgcaattctgaaaatggcacaagacgcgatgagtgaggcgcaaactcgaatgaagtcgtattatgacaagaacagacttgctcaagacttcaaacccgggaatatggtacttttggatggacggaacttggacattcgtcacaaggggtttgcacaggcgaagaaacttgcgccaaggtttattggtccttacccggtcgtgaagcaagttcatcatgactactagagctgaagttgtcgaaggggctcaagttgcatccccttttccacacttcgttgctcaagccgtatcgccgcgacgaatcacgcagccaaaatgttaacaaggtgatcttgaatgatggctcagagggacaacttgtacgtgaagtcatcggcaaccgtcgcaggaagaagctccaatatcggatttggtggctgggggaaccccgagaagacgctacatgaaaacccgtagagaacctgaatcatattccaaggctcattgacaagtactgggacttcaagaagaagtaaagggcagcttcgaagtagtgaggccttcttggaagggaggtcatgtgacgtggacgtccgtctgccaatgagatggcagaggactcccacgtcaagtgctgctgcacagcacttcagtttacgctggacagcgtaatacggggatgcatggtttatattcattatatgctatcctattggctggtgtcaaaagtaaacttgattatgggacgcgtaaacatggacattcgcgcgacctcaatggctgtaaatccttgatatgtgcaacaatcaagttttccagccggacgtttgattatgggacgcaagtcacaaattttggccaagctacgaattggattagtagtttttcattggtagataaggattgatctaggatttgagattgatagactttaggatgggacctggatacttgtttgcgtgtcctggtcgccaagaactactggttgcgcggcagcggcgcgccgacgctaaactaacggatcaatcaatcacttttcaacttttcaactttctctcaagtgttcttcgagcgctcgccactgcgctcatcaagcttcgggtctttggccaatcagaactcgcaaaaccaggcgactttttacagctcttcccggtgttatatttgatttttgtatgtatgaacattttatgcactttttttgcagcatctctccgctgcagatcaggtgtagctcataactaaggttattcggtaggtacatacgaaagtgtctatcagtacagcatgggccagagaaaggaccaacggaggcgagcggttgcgaggtcgcgtagccatagcagacccgcacggggtgcccgcgaagcagggccgcgcgatatctgcggaggcgggcccagcgccgagcatttcagcgagccgagcactgtactcgccaggtgagagaatctttttatcgcaggagcgcagcgaagcaaagcccataatcctatacaaaatcaagatatcggttttcgctgtgctgtactaatatcctatgtcggtacatacagctgtttacactttttcatgcacacttcttgtgtattcggattggctgatgtgactgtcagctggtcataacagagtcaatccggtgaaaaacatgtcgattgttaaaatggaccagcgaagattgaatctcggtttgagtcttgatgtcagtttgcacacatgcagtgctaagtgcattgccgtttgcccggcagagtttttggttataatacatacagagtagaatggtgattactgtacactgtgatctcatgagtgatgatctgaccttaaactatgtgcagctgattctttctaactgcctagatcctgacatcaatgtcatcttgtggggggggggtagtgtattaataaatggtcacacaattcattcatcggaatgtccattcattcctgaaattgaactaaaataacacgtcgctgacactttttgactacggtaacctaagaaaagttgccctagaggtaatagtaatacagtattacagtattactaatactgtagaatacacgtagcgaaatacgaaactgctttgctcgaaacatgcggaaacccggagcgcttattagatgtacataaacgacggctgccctctcggtactggacgcctaccaaaagtgttctaatcacccgccatatctgcagcagatatggcggttcttatttccgagtacgtctgcttatcctaaatttgctccaccacaaaagacatataagggcatctccggtcgttatatttagtccccttcggccactgatacgattaaatggcatttgtatccgggcacttagtctaggacactaaaacatgcgcaatccttccagatttcgcccccgctcgaagttcgccatttttgagagctactcaagagcagacgagatgagcgaggaagaggacacgatgctgctgctgtgcgaggcgtacctgcagcacaacgcgaagctgcacgaggcccgccgcgacgtgcacgacgcgttggcagaggaggcgtggcgcattgcggtgcgcacgtgccactacctgacctcgcagtgcctcgacacgccctgcgaggccgcgtggatgaccttgtacaccagcggccacgaccgcaacttcctaaacgtaacgagcctaacaaggtaaggtatgaatgacgcacgcattattttctcagaattgactatttgatgcatgcatgcgcagggccgccttccaccagcttcttagccgcttttgtagcttctattacatcccaaagccgtcgacaaagggccgccctcctaagctacgctatcaccaccagacacttggcctagtcctatgcttctacgtgggctccatggagcagagcactttgtgcatgctctttagactgccacccagcacgttatcgagaacgttgaaaagagcggaggaggcccttgctaaggcgttggatggatacacacccgcgcgcatctcatggccttcgctttctcgtcagacgcagctggccaagctggtggaggcacgggagccgctactgaagcatacatttggcttcatagacggcaaaaacttcagcatacgtatgaacactataagtgaattttattagtttggttacctgtttgctaacattattcttgacgtactgtacaggtgcagcaaccatctagcgccgatcaacaaaacgcaatgtacaacggatggctgcactcagtcttcgtgaccgggacgatctgtttcgcagccgacggctgcatcaactggtgcaagcataattgcccggggtcgtggaacgactccgacacgtcgctcgagttccgcatgaagctgacggacccgaaattctgcccggatgagcgcctgaacgtcgtctccgactcggccttcccgtgctccacggccatgaccggccgaatcctcacgcccctcaaggacggcgacttggacaggatcttgccctcgttgcgcagctcggcgcgcacgctgcacaacgcgatcacctccgtgaggcaggctgcagagtggggcatgggcagcattcaaaaggtcaacagccgtctaaacctaccgctaccctacgatcagcagctacgaggcgtgaggctgaacaacatgttccgcatgaccaacggccgcgtccgcaccgtcggaatctctgaggttcgcaccaccttcgctaacgacatggcgatgccgcagtaggacggacgcttgtgtctgtacaaggtgtagctttgactttgagtaaataacatggatgttcatcaaagatcttgtattccttctctcttctctctgttgacttgggcactgcaaagtgccgagacctaatttgcatgaaagcaattgatatcgaggtgacagtcatgtcttgattgagattagctgttgtcgctgttgacgttttgctaacaagggttgctttggacatgtagacgctacaaatgaactacccctcttgcttttgacttctctgcatctgcgcgtggatcagtccttgttcgtcagcgcgccgatcagcagcagcagctcctgggtgcgggcacgggcctcctctttgtcgcgacgcgcacgctcctcgatctcgactttctcctggcgccaccgctccaccgcttccgctttgtccgcgaggtaacgcgcctcacgagcggcgagctcgtctcggcggcgctgcgcttcctccatgcgtcgggcctcggccttgcgttcgttctcctcgcgcatcatcagcatcatctcgaagatactgccccccatcgtgctggctgagctctcgaggtcgctcagccgttatttcagcgccgttgtcgctttggcagcccgggcacgctttgccttcgcgtagctggcttcgatcagctcctcgtcctcctcgtacgcacgcttgcggccgactgtgtcgcggaagtcggccaggattccccctcctagcctgttggaggagttagctagtttcgggtagcgctgtgcttcctgctggtcgcgcgtgcgagcgccctcttggtcccgcgaacgaggtcccgacggcttgtcggcgtcagatgcaccactcgtcgccgttgttggcgatgcacgtctcggatcagccaccgtcgggccttcgctggcttcttaagaccagccgagcgaaggcgtgggctcaatcgcatggctaccggtgctggacgtggcgtactcgcgagcgcctccagcccttcgttgacagcggtcgattcgagctggtccgagatgtcgctgacgcgatcggcgggttgcgtggccgacgcgccactgcggtctgtgccgaagctgcgcgtctcgtcggagtgcaccgagtcatcgcccgcggcgctaccgcactcgaactcggtgctggtgcagttatcgccgccggtgccgctcccagcgtcacgacaaccggcgcaggaatcgcgatcgaagttctcgtcgccgtcgaagtcgaagcagaagtccggctgctcgtcctgctcgtcctcttcgccctcgttgccctcgtcgcccccgtcgtcctcgtcgcctccgtcgtccatgacgaccacgttggctttgtcgtcgatggccttcttcaacagcttgccctccttgatgtgaggcggcatcgcttgcactcccatgggcttgcgggtgctgtagagcaccataaactttcgccgaaggctttcgtagtcgcgctcggcgatgccacggccgcggttggcgttgaagtgactcgcgaggcgctcccactcatccttcccaagcgggaggtacttggcgacgagaaccaggaggcggcgaacctcgttcaccttgtagttagaggttccagtaagtttagccatctacagaacacatacgagcgtgtgagtgtaacgacgtagtcaatgcatgcaaagcagcattagcagcgtaccgggaacggcggtggagggcttgggggtggggagtagttgtgctcgaagcggaggacttcggtggtgcttggaaaaagcaggaatgacatcgcaaggggccactgcgctgtcagcggccgcctcagcaacaccacagctaattgcccctcaacgcaccaccaccaatgaagcgccaacagagtgcgcgagttcgcgctcaaaccgcgcgcgcgcgatgaccacggcagactcacgtccaggccaccgttcgttttggcgccaaacaaggctctaggcaatcgacgttgaagacaaaagttccattttctagcaataacagtcaacttcaacatcaaacatgcttgtcagattcagattcatggatttcttgcaaatgcttatcacagtacgcttgcctatgcaacacatcactcctcatcgcttgctacaccttctctgtattcagttctcacctacgggtcgcgctggtcctggatcgcgcggtggtggcacgattcgctgccgcagcggcagacaaaccacaagtcggccccgtagtcaaccgtgatcacttgtccttggagcacgtcttctgtcgtagccaccacgaccgtcgttcgccgcccatttgccacctcgtggaacgtagccaccggctcgcacgagtggttaacaaagcgcatcagtcccccaaggtgctgggcgttgattgcaacgcggacggggtagctgggcgtctctggtctctgcctcatgacgaggccatagccctcgttgcgcggacggttctcgggcgcgacactcacgtgctcgagctcgcccaagtactggcccaacacctcgccgctctcaatgtcgtcggtggccaccacagacagctgccgcgttcgcgcgttcctcgccaagcgggtcttcgtcgactccaacagtccgttcccgcacatgccctcgtacggacagcagttccgattgcagtacaactgcatcaacgagttgcggcagctccccactcggcacgaagacgagcagtcacaccagtcgaagtggggcactgcagggaagaccgtgccgagcgggttgaattgctcacggaggtgagccacgcgaaatggccgctgcgccgggacgaatcggtcgcgtggacgggggacacgaggctccgcgcgaacagcagaggctggactcgtccgcatcaggccgctcgggttcaccgtcggcgaagccggcggctgcagttgttcacggcggcgtgcgtacggaccagcatcagctcggcgctcctggcaggcgcttcgacgctctcgacgcgggggccttggtcgtgtgcgtggcgggggtggcgacggcggcgtctccatcaggacctgagatgacgtcgtggggcgcacgggtttcgcatgggcagcggcgtcgacgaggtggcgtccgtcgtcgtctcgggcggcgctgggttcgtgtccgcgttcggcacgcggaggccatgctgcggggccacccacggcggagtcgcggtctccgtcgagctgtcgctctccgcaggcgtcgtcttctttgcgctgggccggtgcttgctgccgctcgccgcggacgccgccttggtctaccacgttcggcggggtgttctcctcgtcgctcgagtcctggatgcagcggacgggccagtaggtagttgagcggaccatagttactagcagtagagaaagtagttagtataactgaacaaatgcacgcatgcgtgcacaggcgcgtaccttttggttgcaggggcaacgcggcttgttcctcagctgacgattttcgaaagtgagcagccgaaggggagggacgcaacttgagatatgctacgatatatgactgcttcaacagctagagtggatggtcggcatagactatacaaacttcaagatcaacgattaagatgggttcactgcataagtctaggggtagggctgtttattgagacgatttttacgcctcacgaaatttattttgcgttatgccccgccatatctgctgcgtccactggtacagtagtatatgtgcaaggtcaatgctgcccccgttcatctgaaaggaacttggcaagggtgaccccactctcctttttgcggtgtcaagtccacgcgtcatagcttaagatggcatggttgaaggtgcttgcggccagtatcgcaatagctaccagcacgctaagctcgaccggtgtcatcattacgaagaatagcacatcccgacctataaccacgacgcgtaagcactccgtggcggcatcagcctccgggtccgttgccaatttgatcgaggaactgttctcctcggcctctgcatcgcgttccggctccgtgtcttttgctgaagcgttcactgtgttttcttcctctggatcgggatcagcgcagtcctcaggctcatcatcgccacccgtgtcatcggtggaggacgtatcggtcacagtgacgtcgggttcgtcggcgaaatcttcagcgctggtcacgattggatctgtcgcaggggtcggaaaaaataatagcaaaacaattattatggtattgtcccactgcaattatttattattggaagttcatgaaaccaatacaatatgatattgccccaataatagcaatacaatatcaaatactatgaattctggggttgggcgttcataaatgttgaaaatgctatagtaaactattataatctctatttttcgggtcgaggacacagccttgggttgcgaggcttttgtggagcaagcggtgtatactcaatagcgctttgccggacagcaacacttcccaaaaccgtcctggaaacagtacagggctattgtaatcgtcatcagcctccacctgtattttctcactgaataggttggcctgacacctcagtaatagttcgatatcagccatgggacgtttgcgtaaagttcgcgtgaagtttacgcaaacgtcctatggctgatatcgaacggccttcctgtcacattttggcaatgaatagctcatgaatagctcatgtcacgaatggtacaatatacttaaattgtaccaattattattattggttgacctcatattgccgttattactactgcagctttggcctcgcaatacaattttatactgtattatccgacccctgatctgtcggctcatacgatatagcgacaccactcacagccaagagctccgctgtgccagtctaccgtaactgggtgggtccacgctccacgctcggtccagagtggcgctgcgtgctggcgtgaggcacacattatgaagaagtgtccgaagggctacgtccgcagcgagaagaccagcacgtgctgggccgagtgccccattgagttcccagtggagtgcggcatggagtgcatccgccagaacgacgactgtgggcgcgaagtgctctacaaggtcggctctgtattcaacgtcggtatcaacggcgtcatagacaactggttcggcaagttctccgagatggccaagggcgtacgaactgccgtcatgtgctcctgtatgatcgtgggcgagctgcgagcgctcaacctctacatccgctccattaaggctgccgatcccgaggcgtctcaagataaaattctggcgatgctctaccagtcgaacgccgtcgtcgtcgagttgcccattaccatcaagttgtgtctgggcggcaaggcaacttgcaacaggtggcttgcagacagaatcatgtccacgacgcagtacattttggcgcaagtacttgcccacgacgacagcatcatcgccagctggcagcggttcaaggccttcatgaagggagccaacttcacggccccgcccgagcaggttacccaaggcgagatcgggtacctcaaggacgctctcaggtcgaattcgacgtgtggtcacgacctgcaaggcttcatggagcgcacgtggtcgactgccgaggccttgagggagccgaaccccgacatcacagaggacgagctgcgcgtgaagatccaggacacggacatcttcaagtcggacatagcgacggtgacgagcaactgtatggagctgctgatctcccagtccgacgagaagacggcctacaaaacacggtagaagctgcgcaagacgttcggcgtggtcatcaatgacctcatcacgacagggaagagtgacaacggcacgtcctacaaggccatggagtacgcgtaccaggttgtgaaccagggtcttaacttctgggtcgtcacgggcttcgacatgagcggcgtctcgagtttcatctccgagtacttccagtccatctgcggccccacgcagttcatgggcgagcgacgacggcacccacccggacacgctgggcctcaacatgatccagaaggctttcaagaacaccaccatgtcatggccaaagaagggcggcggtcaggtgatccacaacttcacgagcaccgacaccaagaacgtgacggtgaacatcatatctggaggtgacaagatcgacgagatcgacgttgttgccggtgggaccgcgacgtgtaaatcgaccgtggagaagctgggcggtcggaccctgtatctggatcgctggcgccccggtttctttggtcttcctggcaccggagggggttagttgatgctgtgggtacctcgcgcagcagaagggggccatttggacctggacgtgaggctgaatgtgagttagttagttggttcgtatcggtagttagttaatcagcgaatttagtggaaactctgagtgaagcgtcaacttatgaaccgcaaaaaagcagtaaaaaaaatacaagtcaatctttctgatcttgacgagaatgcgactgaattgacctgagaaaacgtaagtcttggacgcagacgcttggagagttcgctcttattgataaaatttgtgaattgtctgctatcgacggatcacaaagcaaagcaatatgctgggaagccgaacagagcttctgtgtcctcgtaagtgttggacgtatgtaagctattagcgcgctgtgtattgtgtactaattcatctctcacgcgtgttttgtcgtggcttggtgtgctgccgacttcgtgaaggcccgtgagggtgaacgtcgctgttgctggtagcgaagctgacagcgtcgctgccacaagtgatctcgctgttgctggcggggtcgctatcgcttgtggtgccgtcgcacctcgtcgcgaagatgtcgacgctggagtcgccgttgccgctggagtcgtcgatgccgctggagtcgccgttgccgctggagtcgccgatgctgcaggtgtcaaagctggcggcggggcgacatctgaagcttgtgttggcgacgaaggtgttgctgctgccggcgttgatgtcgcgggcggcgtcgatgttgctgatggcgccgccgactggagcgtgactgctgaaagttcgagtggaccatgagctgggctattctccacagcgacttgacgcttccgccgcttgaatggaagcgaccgcgtgcctgtgccttcagcttcgcgaattaatctcagcaccgtggtaagcttgagctgattggttctgcgcttacgcttactcggctttaattgaagtttgtgatagccaatgttgaacagctcgatggcgtgaggttcgtcccgaattggaggtagtgacatgcctgcttgtgcttcaactgcgttacttatgtgcctcatcatgatagaccactccgccaaagtcgctttcttctttggcgtgtcgagatcgtccgaggaaatagctttgtacggaggatagccacgtctcgcatcgccaaaccaccacaatatccacgcgccgagtggatcaatactgggaaattcaaattctttcggcagcctatgaaacttaccaccccatgagtagtaggtgtgcgttggaccagaagaggctggtgttggttctgtagagctagtgcgacgaagccccacctccagcaagagcgctttaatttcttggcgtaaacgtttccgagtaatattacccgcggcaacatctttttcctcgagcaccttttccattcgctgttcaagcatttcggggagagcatctatagactgttgctgtttgtcgagcttcttgtacagctcaatatgaggcggtatccccgacggctccatccatctcgactctccgacctccagtttcgaacgcagattgttgagaacggtagggtttgtgaacacaaacgtcgacagaagggggtggttggtaggcaagtggttcactaaaaaatcagcgtgctggacaagcgaagcaagacacagcctcaaaatatcacttaggggcaattcgtcgacgagtcctggaaacatcgctgcaagacacgactttatctcgtcgtccgagttattgcggaagtgcggtggtaggatggcgaacttggagtcattcacaggaagcccagcaacaacacgccctaaaaattgatcgcccgcagcttcatatcgaaagtatctgtcttgcactccgcccatagaccacccacaccgaagacaaacacttacaatggacgggccaccagtacttcctccgcaggcaaatgttgccacacctttcctcaccgagtgcgtgccgtaggttttagccactccatcttttttcaggagatttcctaatgtcttgccgaagcgaagctttgggtcagagcccagaaatagtggccctggttgcgtgcgcggattacatgcccaataaatcgccaacgctgtcacccaacacgtagatggcgaaaacgggtttgcgaaaagatgacgggggtcacgtggcccagcaccttcctgattggtcttggacttaaaaaatatcgccccaacagcatcatctttggccaaaaagtgctgcgtctgcagggtttgaacataaactgatcgacacatgagattccactgagtagttaaaaagagatgcgagaaccccccatcgttgcgctcaagagtagaccaacacagctccttgtacaacgtaaaagtcagcggctgcttgcccgagtgtttaggagagctagactggttttgctcggcctcgagtcgcttgcacctagaaaaaaactgcttcatgtcatctccgtattccacaggcagcgctgctcgtttcaatcgatacagatcctttatcgcgctgcgatagccgcttagcgtcgccgatttgactgtacttcgtttgtacaccaaaaattgctcgaagcaagctggagtgaactctgtgaggtttagatcatcatcggcatcgaagaatttagctgtattgcgatcctccagcgtcagcgcatacacttctctgatccacttcttgatgccgttgatattgctggtgtacttctttctcgtctctttggagatgcatgcgtcgcgtattgccttcacctccgcgacagcgtcctgcgagcttccatcggccatcttcgcacgaagcgttagttcttaaagtgattttggccaatcatcgtggcgccttatcgtcggctaccgccgcttacgccttcccgtaaggatgcgatcctaactgcccctatagtggacctcagtcaatgtgtcgtcctccaaggggtgggaatacaccaattccggaaatcataagccaatccgcctacgttttaacaggcaatcccatatgtaacttacgtaaatacgagaatgagtaatgaatagccgatatgaaagtaagaacgtgagtagggtgctatttcggatatcaagacaaattaattggcccatgtgattgattggcttaatgatttctcacatgttttgattttaagtagctatttggggtgatccacacaacctgatacatcgtgtacttacaatttgtaaattagcttcgttcttactttactgaatagttatcggaaggtccgccactgagcgcagatatcagccaggtccatcgtctggggccgaagcccaaccccaaggaagcgggactcgcatccaaagacgcctccgtgactgccgagcaaaggcccacaaacagtggatccacaaacgggtcaagtccaacttgctgctccttggtcgtattggatcggaaacaacgcgcctcattcaccttgaaacacttgtctggaaacgactgcaggccagcttgttcaacacgagctcgacattaatcgcttcttgtcgagagttcattacatccattcgagagatgcagcttggggtctgaaagtgatgtctgagcctcccaagatgagtctgacataaaaatctggtacgccacaccaaaagcgtgcagtctacaattccagtgaatagaagtcgcggcgttgccatacacttcgctacagtagacgctgtcaacgcgatcacctagctgtatctcgaaactcaggcgaatatttccacgggttatacgggaatgcgagcaaatctccccacggactgctgcgggttcatgacagcggagatacaaactggaggtcccagtctgggaatattttttgggctgttgaagacgcatgtctgtcagcgcctcattgttcacaagcgaaagtagtgtgggtaactctatggcctttcgagttcgcatctgtcgtgctggatcttgttgcctgcattttgtgggcgcgcaaaatagcctgtcaaggttccaggaattcccaccctgtcgacatgaagattcgcgttgcaaaatggagtcatattcttgatgcaagctcaggtgctatcactctcaagtagcccatcagcttatggtttctcttagccacttgttagacggttacgagtgataggtttttgaaccatgattctgacaagagctccctacttcgattcaatctaatcacacaaggtactttatcgacattgattgctatggaatgactggtccccaagaaggatgcagctctcattaataagttcgttgacttgagagcaatgacagccgaatggcgattcctcgagccttggcggacttcattacgcaatttaattccgcaaggaaacggcgcagcggctgaatcgactctgcaagtcttgtttgcctatcccgataaatactcaatgagaccagctatttacctaggacttccaggagatcggcgagatgctacaaggctacaacaacttcgagaagccatggagctgttcacgctgcttgcgtttgtgaagaataaatcatataaagagatgatgattggtttggaggtagcacagtcgggtggaaaatcatttacccaccccaatatgggacctccggtgtgttgggactctctcacctcgaggcgatgggggtggaagaaactacgtttgcaaatgttcaatgcgggcccgcgatttactggaggtgcaagtttcatggttcagcgctggaaggcagacaaaaacctgtccaattggccgagacatcaaccacaatcctgggcagaggtcaaaaaaaatatttcaattcaacaaataattgggttttgcaatacaaatctttattattggacatcccagctaccaataccatatgacattgacccaattattgacaataaatatgaaaaaaagtgcggttctgcggcccaccacaaatctacgtttgatggcatcacatggcaccaccgatgacatcaacaatggggtcctccacactacactagcgtcgatacaattaccggtcaggagcagactcgtagagaagcccagccgccattctcgggcggcctagcgtctcatttcaacattgcattctccaaaaacaatggtctcgaacaagcttctcaccgccttcttcttcgaccatctcggccaaggcctctttcgctgcaagctctgtgcccaagatcgcaagcagatgcccggatccgggtactccaaccttctggcgcacttggctggtaaacacgaggggtttgaggcccagtactcatccttcgagagcagctccatccggtccctccaagcctttggcttcgtccctgaggaggcgagccatctgttccagtggctgcaatgggttgtcatgcggaatatgccggtccacgaagtcgaggacgagctcactcgagccatgagcaagctgcgccccgtcacagctaaggctctgaagaagtgcatagaaggaatcgcaatcaagatcggcttcaagctggagagtgagctgggaaccctgttcggcctgatgttcgacggctggacgcatgctggtgtgcattacgtcgccctgtacgctgtttgtgaggcagatggcgaggtgcgcgcgcggctgctggggctctctcctctaacagacggctcgcagaccgctgacgctcacgtggagatgttcaagaaagttctcgaggtttacaacaagaccctagacatggtggggtttctggttggtgacaactgcaacacgaacctatccatcgcgaccaagatgggcgtaccgttagtgggttgcgccagccaccggctcaacctagccgtcaagaagtttttggcgccgtacgagccgttgctggatgaggtgaacgccctcatggtggagctgcgccacgagaacaacttcgcggagctgaagaagcacaccgacctccatcctatcaagcgcaacgtcatgcgctggtcatctacattcacgatgctggagcgttacattcgtattcgctccgagatcaagaaggtggaggcggttgaggagctgatcccaacggggggcaagcaccgcaagctcgtggtcttattcgagcatctgaagaagttcgagagtatctgcaagcggctgcagcgcgaggatacggacatggcggaggtgcggttgatgtttgatgttctggtagcggagtatcctgtcatggcagagcacctcaagacgtcctgcacactcccgcctttgagacaggtgttgtgaaggtgatcgctggggcagctctctcgcagtcggaaacagcagctctgaagcgcttcgaggtcaagggcccagctggaaagaagcgtaaggagagagaggaggactacgcgtcgtcgctactccgagggaaggggaagaaggagaagcagaccgccggagccaccagctacatgcctctcgtgaagatgatcccaccgacttcaaacactgtgtaacgtctgttctcgcagtgcaagctccttttgaccccgcagcggcgtgctatactcccggcgaacttcgaacagctcgcgttccttcgcgtcaaccgccccatgtgggatgttacgacggttgctagcgttagtgctgaggaaaccctttagatcgtaatccagctaacgaaagtgcgatctttaccttgccattattttagtgatacttttttatattcattgcgaaaagtggacgaaacttgagatctaaaacgaatcatacatgtataagcctaatattcactgttaagatgcaggtttccccggagtcaacatgcaaatattgacgaagaagatgcgatttatctagagttggtatgcctcgttgcacgtatatgcgcttatttacctctttaaatagatataccgcatgatcaaattttaaggtaatgtgcggtcagttattgttagaactaattctatattaattatagtcatcgcacttttactggctacaattcatagcgataccgcttatatttatagcggcaatgcacttcaacattaaatttatactctatgcgcttgtttcccttgggccatcactatccctcttgaaccgtgatgcccaagaaaaacaagcgcctcgcacatattggcaagctggccgactcaaagcgttcaagtaccagtcgtactcgtcagccagcccgccggccaacattggcggaaatagtaggggctagcgtcggtgcgccaagtgcccctacgaatgctgttgtgagcgactcaacttcgtcagagagtgactgctccgacattgaagggccaaatgtatacacccttcagtttatttatgcaaaaaaactgatctggattgatagatctgctgctactagttacgaggcgaattcggtcgttaaaactatacttcttaacccttgctttaggagttatccgggctacagggttattaggattcaagcgttgctaagtaatctaatataccttaccatcataaaaaactatacttcagcacagaggacaccacacccgcgattcgtgtcgacctttgtgcactggctagtgtttctccagatctccagcgcattgttatcttgcacgctacagtgtgcgtgtctgaacataacgcatcgctctgtcgctggcctgtgcagacgattgagcttgaagaatgttcgtgcacgctctctgatctcgtggggtgtttgagggaccccgagttacgaatggctcggggactcgtcaaactcgcgggtgaccccgcgtatgaatgaagtgtttgtcgaggaagaagtgcgcgagttgctgcctcacgatggcgaatttccgcctccggtcaaggaaaaactgcctaggagttcgaaagcggcccatggtcagtgcggtcatgacgtggaccaagaaaacgattcatcgccaagatgcgtacattttgagcttaatctttttgttcgcatcaacaccagtgcagcgatcggttgaatctgggatttttcagatcattatttattttcttttatttggaccttcgacgcaactgtatctcgctaagtctactacccgttggtgctctatcaatcggatattcaaaacgagtgccgcctcaaaaggattaattttgcgtcgaaatgcgctgtcactgttgcccttactcagggctccagcgctcgtcttcttctagctcgacacgagcagattacagattgctgctccggggtggacgcgcacacgaagataagctgagtatgtcggcgtctacactgtagacgatgaattggcttcaacgcactggtcgaggccgtgacgacgctgatcatagcacattttgccttaccagggacttcttttcttagcaacaggtaggaactcgccgtcatgagccaccaacgctttctgtcctctgtgtcatatcgatgccgtcgtgctattacttccagcttgacgacttttctggccattcgtagcgttggatctctcaaacacccagtccagtttttttttttttgcggtgaagagatcatctacttatgttagttgctaactattcaagtgggacagagtacctggatgttcgtgtaacgatagagtcataataaggccattgacggagggaattgtcatcagccgagaccacaacgtgtaaataagtgatcgagagatcctgaagctcaggggacgcagcagccagcacacaaagatcggacataattgttttgattgggatggccaagtccttaaaggtaaacaaatatcttacgtctgaccgatcaagcggttctaggggacggccgttgtactcagctacgccttaggcaagtatcgtatgcaggtatagtaccgtttaccggggtcgtcggactctgcaatatgcataggcagggtccccatcgtcagtacacaccgttaacgaacggatctcgcaggtggctagccgcagcagatccatcaacaccttgggactctcgaaccctaaaatacttttattttcagcgacgtgctcaactgtttgactcggaagtcagattcccaataatttggacgcctccgccacgtttcgccttgaaaacgccgcacccgggaacaacaaaatgcacccgcgccttgtcatcaccgtcaccaaaccctttacttaagtgttaggcgcttttacccccatagcctctaacctccgagctgcttttcgaaataagggggtgtttgggagaccctgccctacgaatgaccagggatcttgtcaggcttcaagtggatccgtcacgaccgggcgatcaagaagtgagaaagttattggtgcacaacagtgaggacctacctcccatgagacttccagccaagtcaaaggctgccatgatcagcgtcggcgcaagggtgagaagtaccaaaacgccgatttactgcatggacgcataagttttaagtaccattttcgagtttgcctcaactccagcgcaacgatcagtcgagtacaaggaggagtactactggtagaagccaccaatatttttttacttttgattcacgtgtcaataacgacaaaagaatgtgaaagttattgtacttcaaagtacttcgaagcagctgatattgtgaacagatcgacggcttctcgcagcagcttcatcgaaaatccgatattgaggtcgaagctttcaaatgcaaaccaaattgcaacttctagtatatcgagcctaagtttcgtcttgaccagaggtaagcaatcgcggtcataagtcaccaaattacgcacttctccttgcaaggcgaaagagttccagactaattttgtattccaggaatacaaaaactactacagtctgtagtagttggggttcaaatggagtctatatattccggactcgaatccgtctaaccctatacgcaatggaacgctgcgtcggtgtagaagcgaatgcaaagattaagctcagaatatacgagtccatgccgtaaattggcttcgtgctccaaatcgcggccgtgacgacactgatcacggctgacttcgaactcctaggcagtttttccttgaccagaggcggaaattcgccgtcgtgagtcatcaactcgcgcacttcttcctccacaaacacttcattcttacgcggggtcaccttgagttggacgacctcccgagctattcgtaactcggggtccctcaaacaccccacaagatcagccagcgtgttggagcattcgtctaactcgatcgtcttcacagaccaaaggcgcagagctgcgtcgtgttcagacaccaccaccgtagcatatctgagacagagatgcaggagattggggcaagccctagccagagtgcaaaggtcgacatgactcgcggctgtagtgtcctctgctttgaagtataatttcagcgagcaaaggcccctcgtgaccagcaccaacacatctatcaacacacccggggtctcgaactcgacatagaatagttccagagctcctttcaatcgtttctccaggcatgcaggcctcccagcatcagcagcgaatcggacgcctctgtcgccaagttttgccttacaagcaccatatcccgggacgacgaggttgacccactcactgtcgtttgaatcgaatagggctcgacagcgacatgcacaggccaccaaaaccgaaccaccatccccatcaaatgccccagagaggcgcagctctgttcgttcatcgatctcgacaaaaccatactgatgggagctgttacgatccgcctctgacgctggctgcggatagtttgctcgaagtgcggcgcgcatggccaaaatgtcggtcttcgtcaaagctcccttccgaatctcgacacaaggtacaaccacacccgacgttccaccacagatcgcgtaaatgagccaaggccatcgccccgatccctctgaatccatgtggaaagattctaggtgtgactcggctgacaacgccgcgattgcggagcaaattgcaacaaacgccctgttggaggccctggagcaccgcaacctcattttcccaaatgtcactcgaatgggattgtccaagtattgactgtcgttttttgtaacacgacgaaccagacttccccgagttcatcataactccagcgttcagcactgcttggcgcgagtttatagtagttccgtcgagatatagcgtcaagtctgctattgccgtccgagccattgcgctggacaaatcagagacggctgggtgagaccactgtcttagatatgcaagcacgaggtcgcaaggcttcttgtctgggctccatgtactcagaagactagcgccgtctcgtgtggcacaaaaacgcataattggaggaacggcgacgtcgaagaggattcgaatttgaccccggattgtgttcgacgctccggctgattggacaggctccagtcgcccctcgagctctgaaccatgaaccttgcacttccagtaaatcgcaatcccggtgttaagacgcgctatcgtagactttcccgcccccatcgcctccaatttccgcactgcagctcgaaacgcaggcgaattcccccatggatattccgggaaaccgaggaaagtcccccacgtcactacggtgtacatgcgcgaatatggcgattcatgtcgcatacgccgtcaccacgcgtgtgcggaaggtatatggacaccttggtgtgcgtgcattagcgtgtgtgtgcgtgtgcgtgaatatggagcgcggggctatctgcacggcagggtgttgggtgtgtatgtgtgtacccatgatgtggcatagtgcaagtaggattgtaggtcacagggtaccctaaactgtccaaaatggcggtgaatgctggccacacgtttgttctgtgtgtgccacacacctccctcaatcccccctcgtgtggcgcatgtagcgtacctctgttcgaaatgggtacacaaaatgtagccatccacgcacccagccagccccgactttgggggttgccagggacgtttagcccgtctgtgtccacctgtgtccacctgggggtgtccacatataccccttaagtgtgtgtgagtgtcgggtatgaatagcggtgccacacatgagttggtgtagacggccatcttaggctgaaagcaccgtatcccgtctgctctgcgaagttaagcagcctcaagctcgggtagtactcgggtgggtgaccaccggggaagtccgggtgctgtctacctttttgctggtatttgcctcacacacacacacttttgcttgttgcgtttgacgagttataacttttgccccagggcgaattggagagtgttactttgtgtgagggtacatcagacggtgtactacacatatatgtggggtggtccactccaactccaacagggtaccatatatgtggcacacccactattttagaagttcgtttatactggcttccagtatggagtctcacctgaccccggcatcggaaggggggttctgaagggtgctctttcagatgccggaccggtagcacgagaacgggcagtcctaccttatcatacggcatggggttatgcacaaacagggtttgctatgtaaaaggggcaacatgaagtgactcgtctctatctccgggtgggatataggttttcgagggtgccctttcatgtcccgacctcggatcaagagacggggcagtggaaccctatcaaactgaatatgcttttttcaggtggtattctgggcaggacacatgtgagtgcccatctggctaacccggtgggatataggttttcgatggtgctctttcacgtccaggggtcgggtaaggccagatgttatgggaacactgcgaaactttataatttaaagggaattttatgttatccagaaccactttagcctcgtctttgtcgagctcggtataggggtatttcgacccgctcctgctccatcgaggtcaagtagcgcatacactccatagtacttaatacacttagattgacagggcttcgtaaagggacgatagagaaccactgcgcgatactctccccattaattgcacccagctcacgaaacgtactagtaaacaggacttgccgtcgatccgcctccgtattctcgtagagccactctatgaagcgagataaagttcgtagatagacgtacttggtgttgtcagaggtgatacttcccagcacttgctcaacgcgagcatcgagagcttccatcgttacttaaactgcgactcttgccgatagaaactgtatcgaaatagcatagaagtatttctagtttttgtttcgttcactttgcacgacgaattccatttatctatacatttagaggaagtcagaaagcataaaacaaaaatagcagttctcattttaacccaaagacattatttggaacgtttatttagattaatctatactcggaggcccgagtataattaactctagtttaaactaagctacgcttcctcacacacttgcgcacacgtgaaagctaaagtagtgagccaaagtaggcccattacaactggtgtcttcgtatccccctagtcaccgcgcaccatccactcagtgcccgctgtagtgtagcgaacaaagctgtactccgctgtacatcgttcacttcgatcatggctgtcggtagcccggcgtcagcgccaacgtactcgacgtcgtcgtcattgacttctcatcccttgacccactcgtcatgttctcattcatcggcagccctgaccccgcccttattcgcctgcggttcttgttcgcaatgtccaccggccgcaaccccgccatccacccgctacttgctgcagctcgctcggaaacacccaaacctgggagtagatagccatattaaataaaccgcaacaaattcaaacgtacaaacggcaggatttcgacctggaaggtggacaggtacctgatgaattagctgagcgtcagtcaactgatgcgggcatctgctactgctacgccgttgagatcgtggaagtcggtcaacaagtcaagtagtggtggtggagcgatacgggatttgagtgatccaattgtcttggaactaacagtggaattggcttcgactgcgatctcaagcaatcttctagaaatcatggaggctgcgatctcttcgtcttaagcgttgatgaatgctgagttcctgttgaacacgcagttctgtggtgggtcaaccaatcattcccacgattgcgctccagtcgcgattggagaacactttctatcaggcttggaggtctgcgacgcgttgtttcgggcggtcagctcgggtcggcacaggcgagtttgtcccacccgattctcgtgttacgatgcttcgagcgattgccatggttgatttacgcacatcttacatgagccgaggttttcgggtctacggtaacagtgtccgacctgaatacaaattctgtggttctttacgctggatatcgtacaccagtattgaaatcgaacggaaagaaatcccgccagtacggttttgttcagattcaaaacggggcccaagtgcatcgttgcggggaaaatatttacggtaataataattttgttatgttgtgaggctgccattgcccgagccttacaaccccactactggtaaatgggtgagtgtcgttgtacctgggtacaggatttgcaaggcaaaacttggtgatggcgttatgttcttccaacatgattaaacgtccccggtcgtattggatatactgtcgttggttgctactaggcttcaagtgttgatggtcgaagtaaaatactgtattcaatcagcgccgccgcagatttctcttccagaagtcaaaagcttcccgatgggacacattaactgttgtggtgtcggtataggactataccgacaccacaacagtgaagcgggcgatgttaccctgtcttgcgaatggttcgggaactggtcactctgcacgcgtcactaccatggcacggcggatacgacgggtggaaatgagcgagttaatgtgtcaccacggcaagctcctgcctttcacgaaggataaacttcctggcgaaggctgcgttgttcagcatagttacgaccacttcaagaagccgattcaacgcctaggctcgtacaggttgagcccaatatttaacaagcgcaaaacaatcggtataatacatatattagtctaacatgtaagcagacaaaattgacgaagtccgtcatgttaacgatttcaaatattcgttgcaccggccagtatcgaaatgggtctctgtacatctttatccgctgtataatagtgatatgacgaatccgaagggattgatggcaaacacttaactaagctacaagaaagatttcacattaaattttgtcagttgtgggtcatggcaacccagtgggacttcctcgaaccgtggcgagatgcattgcgctctagcttggctctgaaagagaagagccattcgaccgcgtcgactgttaaagtttcgtttgactatccgcatgcgtgtacctcgttaatgaggcgacgaatgtacctcagactccaaggcaacgaacgagacccagcggtgcttcaatgacttcgagaggcgatagaactgttcacgctgccagcgtttgtaaactatgaggcgtttaacgagctgatgggttctttgtcggtagctacgacggacaaacaagtcgagtacaccaccgaatgggactccggttggatcccctcctgcgctcccatcgcctctggttcctctgctgcagccccacctcacttctttctggtatacagcggggtcatcaagcggcagagtcccatcaaactggaccttgagtaacaacgccgttcttctgacttcgatggctgggtcacggatcacggatacattcagcagcttgacgaacgcctccatgcccacgaacgagagccgtttcgacacttccatgacctcccgatccaattgcgcttgtatcactggtgcgtagtgcagcttgctcaagaaactccagtcggttatggtctacatgtatgtcactcgttgaatcgttgaagtggcgccttccgtcccgcaataagtgtcgtatctttctccagctctcccacccccgtaagtcaccaacctacaatgttgacacgctaccgcagctctctgcaccacttattctcgaacacagcatatcctccaatcacatccctctctcaccgcattatcccccaatccccactcagcaaaagaaacgtcgcagcctcctcttccacattcacaagcccctgagcagctccgatagatcgagcaggtcacaccccaagcttcagcccccacactcccgggcccctctctatcgctcacacgacgccatggcggacagggttttctgggcgctcacgtgctcgctgctgtcgctcagcggctgcgtcttcctcgtcctcgtgggggtgctcgtgcacctgcagccgcagtacatgaagctcagcaagagcgtcgagggccccgcgcccatcttcgagtccgcgtgcctctacgccacgctcttcctcgtgtcctcggccgtgtactacaaggagacgcgcaagggcgaccaggagcgctccgacctgggcgcgtccacgtccgacgagcgccagagtctgctggacaagtgcgtaacgcgctgcttgggggtggttgatgggtggtgcagtcaagctaatgtgctgttgctgtggggtgttgtgtaacaggcccatggtgagctacagctgacggacgggtgacggctttcggtggtgacttttaattttcatttagcttttttcttctttctgtctttctggacgtcggtgagcgcgtccaagagctggttaatgtgaatgcaatgactatagttttgtaaatgcagtgggcgtgtggtgcaatggtagctctaggctggcgctgtttggttggacgaagatgaagcgtcgcggttgaataccgcttgaaacaatcgcagcaagatcatgtcaacaatgatggcaaagatactgcagaataatcataggtttgttgctggtggacatgccagagccttcattctgaaatcctctctccatccaaaaaccaagccgcgctgcgtttgacgactcggaatcatgcacctcgtgcagtccctattcctgctcctggtcacgttcgtcgctgcatccagcgcttctctaggcgaccaagcgcccagccttgtgcgtcgagatgcctccgaggacagcaagccagcgtatagtggaggcaaaggcacccacctgcgcgacgacgagaactaggagagaatgcgtcgattcaagttcaaccttccaggtaatttcggaaagaaaactggtgtcgacaataccctcgacgccattggtaaggacccaaagatctcagagagcaatccgagcgtgaaaaaggtgggggcggccattaagaaggatcgcaactacctcacaaagctctggacccccccccccccccccccaaagcggtggacaaactggccaaggaccctggcatcatgaggctcacgtctgctctgaagggcgatggcaagactatcgataataagatcatgaagaaagagatcaggtaaaaagagatggctgagagtaagaagaagggcttattcgcggtgctccttacagcactcaagcacaaccgcaaagctgtgctcgcagctactgcttttttcgtaactatgtttgtgatcatttcacttggaaaggctggggttatcaaataatacacggagttagtacggaaactgaagattttcacgagtggagcagtgaaaacagctttttagaaggaaggcaggaagttgaaaccaacgcagatgaagacgtagaacagcgttagtttcagacttcctttacagcgctcacagcttaaccctccacgccacaccccggctgtggaggcgctgcaatgtaattttcaacttttgtgccgggttcggcacgcccccaacaagtaagacgacgacgacgactgaaaagcttcttaaccggaacacttcgtaagaaaaaaaatagccgtcgacctaatgggtacattttcgccaaaaactatttatcttactcttgggctttctatcattttttccgtgttagcgttacacggtaagagaatcgttatatggcggtgaggataatggttctattatttgaagaatcaaacatttcgtatttgaaagagtgtgccgtgccttcatcgatacggaaactaacttattgccaacaatacttcgacatcaacggtggaataagttaaaattcaaccacccgttgcgctggtgttgaagcaaattaaaaaatcgcgggggtgatggaacccgatcgcgacattttgatcaacgtggctgctcccgacaccttttgtatcatagtttgctcccacgtgtacgaattgagttgatcgaatagatctggcccttgcgggcattgtttcaccggcaaaaccccttgtacaataagatgcaccgtcctcgaaatgacgacctgacggaagctgcgttaaactcgccaaccgactgatcgcatggttgtgaactttcactgtgaaattggaaggattaccagggcgaagaggtatttgggtggtgttggggaacgacccacaagaaataattgccattggttttgcccaaaagaacgagccagtcacggaaactagtatggctattcagctcatcgcccgagccatgcatcagctaaagcagcgagctcaactatctacagtctctcttggtgtccaaggcatccaaccaatgatcaagtcggctcgagcccagaatgcctcgcaccaagcgctcaaagacgttgtctcgatcagcttccaaacgcatctacaaagcgatcaggggatttctcaaattgcgacaactatctcagtttaccaatgctgtagtccaaattccactaacgtggggaaacttgcttggatttacaacattatcgagcgtatcaagcagcggtcgacaaactcgtagcggtggcgaatgaaaactcaatcaaccctaaacggttgcattcacttttcgattcggtggagctgtaagtttctgactggtgaagtaagtagcaaacagatccctcctaaacccgttggcgagaccaacacagtttttgcagaatttgatcagcttttggaggctagcgtccctgctaatatccagcttatacactgtatcgcgtgaccgctgggagactgaactttgagcggcaaatcccagacactgccatgctacaaacgtgtgagagggttggtgtcaacacattgatttacgatttagctgcgccaatcggacattgtggagatgacagcgggattggcttggagcgcgatttcagatttatttgttagcctagattgctcgactcagtttacaactcaagcgcttctcaacgcgggcgtcttcctgggctcagtgatctgcggccgcacactgtgcacatcaaagattcacggaaaccaagcacgacttacatctcggacggcaatcaaagctttgcaattgtcatgtgacaagatacctgacgatgtttttgccgccacttgttcagcactcagtgaaacgcatcggcaaacaaaattaatactcctgactgtgcggtcgatcaatcccctgaggtgggcgtggctggtatatgctctctactacagagcttggaacggcgtagaagacactgactttgctgaatcaaacttgcggattacaaatattaaactgacccgcgcagatgtggactctatagaagcagcattggagtatggctatccaatagaatcgcctcaacgtgatcttgtctacgggttcgtggatattcacgacggaactccattgtggcctcgtgggtgtccagaagctggtagcaacggcttgattgcatcatctcaagtccgatgccgagcttgttacgacccaaccaactgcgacttcgtggaaatccttgtccctggttacgggatttgcgaggcgagaactggaggtgcgaccgtgttcacacccgtttcgaagtaaccgtgcgtgaccaaaagcgactttgtaagagcttggcattggagttcgactcgattgaaagtgttgggttggtgatggatttgctcaaagtagcatttcattgcattcgcaggttatcgattagtgtggacgaggggcagctcctcgtggaccggagcgtggtagctgccgtttgcccagcgctaaagtctctgagcacatcgtgttgtacgatagttgcgtctgcatattactcggctctgtgtttgtggcccattaaggacatgacaatctgccagacagccacggtgacacacctgctatcattgctgtgaaatccaacgcttcgaatgagacgggagctcgtggagttaatagtgacgccggttcagaaccgaaaatttgacgcggaggagaggagggggctcaaggcccatggcgaggagtttctgcacgtcacgaaggagaagttgcccaacccggctaaatctgcactgattagtgccgtgatgaaagaccacacggggcgtcactctacgatgaattcgagggcaattcgccacctggacgccaatatcccgagcctgatattcgtattcgcgtcgacacccgctcaaagatcagttcgatgttattagtagagtttttctgccagctgtatcgttcgttctactcttctgtcctgccaaccaatacatttccgatttaatacaggtgaacttacgctactctttttgctgtcgtcatgaggatacacaccagggatctgatttatgagtgctagaattgtagcttcacagtcttgtttttttttgtttttttgagaagaaaagattattgagttacttgcgtaagctgaacggtttttgagaataaaagattattaagtttcttgcgtaagctgaacgatgatatcaccacactgccatgtctacagtaccgttgacgtatcatctagtggcttgggttgatagcgcacattgacactttcaatgaaagcgtaaattgttgatgcagactggcgcactagtttttgtcaagaagtttggatgatcgctccttcaaccttgcaatttggcaccttcggcttcctggagatggctccgtagtatccagctcggacgcagccgcgcagccgagtgggattttgtagtgccgtggtacgctacgcagcttttgatgcacggtagtgcagtgaaaatacattttactcggtcctacgagctgtcttccccgtgctactgccccgccgatgcaacgcggcacaatttttacattaaagttttcgtatcgaaggcaagccaacgagaagctgcagcagtacaacaactgggggagccgattccgttgtatactcgtctgtcgtatgttaacaatggcgcatttgtcgagctcatgattgcagcggtggagatacaagcaccgggagcagatgagcgttgcttccatccgagatggagtcttcacttatttggagctgtatctcctaaggaattcgtagcaagtcaaactccagtcacctggggcgcgatgatgagattcgcgggggactcgaccgagtaatcgcctgagtttcaagcagcggctcaaaagttagaggcgatgagtagcaaccattctgcctgcatttggtatcggccctccgttaactgggagattagcttccgggagaacagagtggaaggagcttgagaaatcagccagtggggtggactcgcatgttaatcaatttcgaaacctattggggcttcacattcctgctgttgcccagctgagtgttgctagtgtgaaggctgcactggttgacatgcggcaaggaaaccccgcttgccgatgtactggaaatgccgaagtgcaaaagcgtgtgaggaaggatataatttctcgggctttaagcagcgcgaaatgggaggatctcagcgacgtggtattggacgacattatcgccgccatttgttcggctattgctgatacgacgccttctgctcgcctggacagcgtaatttttaaatcgattagcgtcgagcagtgggcgtggttgatatacgctctcgacggcagggcgtcctgcctaaccgatgccgataacgtcgtgccgacggtgatagttcgagcagagaccttgaccaacgcgattgttgcagtgcgaaagggcggcttcccagaagtgtctgtggctgtttacggatttcgcaaggtaagacgtgatattacccctcctcatacagaggaatgtcgcccaaacaagcaccatctttgtcaggacctaaaattacgggttggtggtggatccgtttgtccgcggttgtgtcgagttatcccgaggcgctgcaatcctggtccatcaaagagatccaactctgagagacaaacacagtgtcggatctgcacaaccccaaggatcggctggcacgtgaacttataaccttaatggcgcaatatataagttcttagtaaattcagcactttaacatgtcttgtcattttctggtcctaaatttgtgggcgtcgcaagatatgcaagctgccatatctgtcaatatgttggtatcctacatactaacggcgatatactacaggtctcaaaaaatatataatataaaaattatagtattatattgacggaataactgattattgggtttccgtaaaatatgatattgtaccaataataagtatattgagttttcaccagatttcagtcgttaagacactaaagttctcggttagaacccatttttacgccccaaatgttagttttacggttcagtattgccccaatgatacacaataatgattttattattattacgggagcctcaagaaatggaataacggatgattttttcatagattcccaattcaattttatattttattttccgagccctgatatactagacttggtagcgtggccaaatttctagtcgacagaacagacacccctgccaacttgaaaactaggcgttcatagcggtcgtggcgaccatagcgttaggcttccattatttgagcggtcttgcgtgctgacgttggtgttgccacgctgccgtgcggcttcctttttgtgactagccgtaggattcgagcgccatcttgtccttgccagtcgttccggtggcaaagcacgaattagttgtcatggccacaacttaccacgtcaaagtgctgatctacgccacagaggaataatatgaacgcctgtgtctactaatttggtttaggatcattacgttaatcccatggtttgaagaaacagcagaatgttttgagtattcagctgaacttaaaagcgacgcttcgagagaaaaactattccccatcaccaatctgcgcgatccagacgaattcaaaatgcgtgctcggttcatcacgggcgcaacacgattgatgtttagctctactaggagacagaaagtgatattgcctcagttactggcttcagtaaccgggtcaccaacagaaagacagacagtgacacgggaccacggataccggcctcagctaccggcttcagttaccgaggtgcgaattaacccgacagcttacccgggcccatgggtcccggggagagacgtaattcgtacaactaactatgcactggggcggcacgctgctcgttggattctattgtgttgtatagcatgttgctgtgctatattgtgcttcgtgatattttgcacaattattttgatgtatttgcacttcgtagtttactgtgatattgttcttgtttctcaggttgtactctgttgtgtgttttcatgtatgttgttgtacttactcctatttgtatcttgtcgtagtctagtccttcatacccccaatgtattcctaccgcaggcttctgacctggcgacacgtcatccgtgggcgcggcttcagatgagtgtgacattttctgtagtttgctgtctaaacttctagcaaggtgggtggctactggtttttaccactccgccgtcgatcacctctgttcgaacataatgctccgtgttagcaccatcgttaccgttcatgccatccacgcatttacctagcgtagttacgcgtttgcccccacgcagtttgtcgccaagccgaccccttctgaagttttataaaacgaagcgctggctcagctggcggatccatgctcgtcggccttctgtcctacctagccagatccaaaaagcattataaccaacgtcattatcacgctcgactttgtgaccccattacccacctcatgtacctgccgccgtgcaaatatcgaaatgaaggcaagttctttcagccttagggctgaaagcacaagcgcttttccgggctgcagaaacgtatatttagagttttttgtcattaaaacgtttatcaacaaaacgggtagtggctacactgtattatgtgttgttggtgtgcacctcatttgggttttgtaggaagggggtcggtgaaacaggtccgtaaaactcacaagggacagcgtcgggtttgtgaatgtggcgaaattcagcttcccagatctcagttaattcctcgtgtgtagctattaacttaggtataatttttcagcaatccacggtatttctctcgagtaagtttagggcagaaacaatattgtgtgaagtggctattagaaatgaaaatatacgtaaagtgacggtactgcgatttttcgcgaacggtcgcgaagtatccactgtgcgtctgatcaagttgacagcttgcgccctttgcgccaatggagtctgaggcctatttacgggggtctttgcagcgcttgcagctcaacttgcagttgcggggtcgctcgagtcacttgagttcagtatgagttttgtatgaacttcaaccgttatcttcaacttcaattgaaccttaccggtaggtttctaaaatctgaagcctttccaaggtgggccacatcactgttgtgtattacacataacatagaggtcgcccgctgtagaggcggctgggtactgcttggtgcagctatatggctgtgtggagatgtggctacccacgtaaaacagtgtaagagctgtattagctgtacactgcccatagtatttctatttgacaatgcactgtgccagcgttctgcgccgatcgccaatctgcctctactgcggcgactgtttatgtgtaatacacaacgatgtggcggacctagttgtctgttgctttcacaatgtacttgtcaatatctatcgttagtctcttggtatcatttactgctagttttggttttcgcaatagactgggaattcggagtcaaggtggatcagattaacccgcgccgcgcgggagccttgcagactgagatcgctgcctttgcccatgttgttgctgcgtttgagaccctgcacaggttgagggaaacatacgatgcgaacagccctgttgtgcagataacagtcaggtgcctaaatattaggctggaggccctggagcaggccaggtttttaatggaccaggccgacgaaaatgctcctgaatcaatgcatgaacggtacgatgaggagcgagcgcggcgccgtcaagcgcaggatcgacgaatccaagagctccgccagccgtggcgcagagcggtgcaaagtggcgtagcagccacccctccacccgccgtgattatctttccaaggcttcaagtagttggtgcgccaccgcctctggcgcctacagcttcgtataacgatcaaggacacatcgaggatcaacaagaaggttgttcggacccgacgcaagccagtgaagcagctgatccgtcacaggagacttctacggaagagggggggttatgacgcagcacaggcgcctaagaggagcaagggcgagcctgaaagtgacgaggcggatggcaaggacttggcgtcggcggaggggtcaagcctgggttccggttttgcaacggacgagtcggaggagaaggaagaggtgggacaccgcaggacgccaccattggaagtcgacgaagcgagcagttcgccgtctgagtttgtgccgtcaaatgaggagctgagtgagtgaggtgttgcatctggggaagggattgcgttgccgtgaagctgaggatacgtcctacaactgttgtctccgagtacgtgtaggtaagatgtggacgcgcttcactagcaaagtaaacattgcgtatgtgctggtgcaatatgtggcaatgccacacaattatttttctgggacgtaagtacattgtgttgtggttattacatagttccataaaatgcatttgtgagattgacgtgagattttggattgttggacgaatgccgaccgaaagtacaggtttatgtggctacaccatcatctactacacttagttattcgtcgcggggcgacatgacggagatggcgatcgcaggtggctagtgatcatattcgagctgaatatctgcatatggagaactgcaaagggaaggcggatgtagtgtaaccgaatggtacgtggagtgtcattgtgaaatcgattaaatgagggaggtgagcgactaatcaatgttgaaacttactactggttgttcgaaatgcagttcttgtcgccgcactgaaacgtgaacagtgtaagaatcttctcggagtagcgaaacgtcaactcctgcagcggtgggatgtcggtttccgcaaagacaccgaggcgcgatccgttcgtccgctgtcgctcatagagagcgcagttaggtcggcatgagtgattgatgaagcggctttcattttcgcactcagcggcgtcgatgaacacggtggagtcgtcccagatagccttggctttcatctgaacctgatagcgacggttcgggcgcgtcattgcgtccttgtccagcagcaactcgccggcgtactccacaacgaaagctctttttggaatgggggagctgcatatgacgccgagaccaacgcgggtggtgataagatcgagatggaagctcggcgtgaatcggttgccgcatgcttcgccaacggatcagttagtgtcagcgacgtcaagttcaaaagctagaggaacatcgccggcgcctggaagacgagactgactgtaacggagttacacgagagttgcccgaagggttacgcagtgggtacacactgtctaacctaaatcagtaggagaatcagtacttggcttcagagccactgattgtgcatatgactagggttcactatgctagatagtgaaccggatgcatttacaccgtaggcggctttgccgcaataaagggaaatacattcagtttgagattcacacagttaagagttaagggttgactcttggagtccgtagggtgtacggactcgtacgttctggtattagaacgggctatcttaagctgagactctgtgagtctgtaaagcttactctgacgcaaagctacggcagccccgctgcacttggtagcacttgtagtcaatccgacacctgagtctgtatagactgaccctctgtggagaatggagcagttcactcacttgcccccgaaccagcaggatgcgcttaaaacgcttatgtccttgctgggcccggagggcgtgacgcaacttgcgcagcaaggccccgacgcggtgaacgcgcgtctcgaggcgttttcaagctacgagaatgctctgctagagcacctctagcagaggatggcgactgccgcggcgccccaagcgcccctttcgtcgtccgacgcgggaacaagacccaagccgctcatgttgagcgtgaagaccttcgaaggcaaggagggtgaaagcttgatgctttggacccgtgaggttgagatggctatgagctcagctttactccggacggaggcgcagcgcgtggcactagctatctcgaagctcggtgggggagcgagagagtgggcacgaacgtctgtgatgtcggtcgaggtggccttcccgacgtgaccagctgaaacagcaattgtcccgagtgtttgctccgcctaacgaggcgtatcgcgtgcgctcacgctttctggcgaccaggcagagcaagaaggagttgatgaactatgtccaagagttgagaactctcattgctggcatgtctgcggaccccctgccggaagcagtcaccgttacggtgttcatggagggcctccgcactggcgttgccaggacggaggtgttccgaacccacccgagctcttttgaagaggctgtgagcgtcgcattgaatgcggaacacaactttaagtcgtcgagacttgggtggaatgcgtcttacgctagcgcgtcgagtggtccggtacccatgaacctcagctatgctgaagacgaagaagccgagcttcgtgctgctgagcagcgtcgcggcatccgccgatgcttcatctgtggtgacacccgtcaccttcgtgctgggtgtccgctgcgccatcagcgccaggcttcgtcaagccgctcttcgagttcgagccagggctctggttcgtctcggcgaaacgagaagtcccagtaggcgcggggcgacctactggggaagaactaagttctattgagcctcggcgaggtggaggtcgacaggacttagccccgatgagagccgtactctctaacacggaacgtatatgcaagccgggcttgctagttgtccaagcttgggtgaagggcttcgcgaagccatggacgattttgatcgattcgggagcgtcgggaaactacgcccggcgttctacgatggacggaagtcagctttatgctgaggcgctggtagcgcgcaggagtgacatcgtcactgtttgtctcgtgacgggcactcgtgtcacggtgcctaaggtccctgtggacctgggcgtgaagtttttggatttcgatagcgtggaacgctgtctggtcttagacctcgattcgagatatgatctcatccttggtatggcgtggctggaacgccacgacccttggatcgatcggaggttgaagacccttggtgctacgcacttctctcctggcggagcattggcgagtcatgaacccacctctgctaggaagcagaagcgcttctagcgcgagcactggaccgggttggtcaatgtgctggccatcggagtttccgagttggtggacactgagtgtgtcgagaacgagcgttccgagcgtggctcgcggacggcaggtggggcggcactaattccgctgaacgggcgtgcgtctgagggcgacgccctgctgcgtgccagcgacggcgcggtcggcacgatgccgaagaacaaggggctttgcccggatgaagatcgtggagtggcacgcaatccactgagtggaggctgcggatcgtgcagctcttcgctgagtgtcggtaaagacactggagctcccctggagatgaacgaggtggtgacacctggcgtcaagacgcacccgaaatcacggagctcttcagggcggacggtgtccatgaagaggaggcagcaccacaaagcgctggccgcgagacgcaaggcgtctgtgatcttacgagtcgagaagggcgtgtcgagcggtgaggctccacgcgagcacgaacagctctataaactcgtgaatggagtgacgggcgacgtcgacggaggtatcaacctcgacgacttgccctcactgtctgctctcctggagctggacgagatgtccttggccgagttcggcaaagccttgaaggctggtgacttggctgaggtagtggtcatacgacccgaaaaagagttgaactcgtcttcgcttctggatgaagctgtcctagaagacacaaagaaggcgctgaatgcgcggagcggatcggcgatcctgaggaacccgtcggatcccttgtatcaagtggtaaaggattaccaggacgtggtctcgaaggagccgccctgggggctacctcacgatcgaggtgttcgacacgaaatcgatctcgttccgggaacgaagtactgcgtgacgaggcagtagcccttgccgaagtagcagtgttacgtcattgacgcgttcttccgtgcgaagcacgaggcgggcatggtgcgtgagagtaagtttccacactctacgccaacgttctgtgtcagaaagccgaatggcaagtggcatagcgtgcatgctttcaacaagctgaatgccgctaccattccggcgcagacgccgattcctcggaaggatgttcttcagaacaacatgacaggatgtacgatgtacagtgcgctcgacttggtcgatggatattaccaattgctcatgaggacgagcggcatgctctaggagtggttggtgatgccccgagggctttcgaacgcgccagcgacatttaatcgtcttgtgaggcagctcttcaggccccatcgggcgtacgcgcatacgtacttcgatgacatctttgtccacagtcgtgcggagcacggaaagactgatatggagaaccatgtggagcacctgctggctgtgctcgaatgcatgcgtcaaaacaagttgtacgccaacattgacaaatgtatctttggagcggaagagatccccttcttagggcctgagggccgacccggtcaaggtcaaggccattgttgactggccggttcccaagaaccagaaggatcttcgcaagtggcttggcttggccaattacttgcacaagtacagcgagaactacgctgagatggctcggccactctccaatctcctgaagaaggatgcggactggtgttgggacaccgaacatcaagatgcgttcgcggccattaaggacagtctctttcatgcgcctattctggctctgccagaccccgctcgtccgtttagtgtcgtctgtgacgcctcggactttgtcttcggctgtgcactgctgcaagcagacgccgaggggcgcgagcgatcctgtccatgacaaagagctacatgcgatgaagtatgcgctcgtcaagttcagggttcacctgttgggctctcagccgttcgtgatttacacgggtcatgcgtcgttacgcactgcgactcagtcgcctcacctctcgcaaaggatggcccgttggttgtccttcttcgcggagtaggacttcgaggtgaagtagaagtctggcaggcagaatgtccttgcggacgcgctgtcgcgcaggcccgattatgagctggctcatgtaacgaccgtgacttcgtcattaccagatctgatccgaacggcttatgccaaggacgacacctgtgtcacgctgctgaaggctctggggagcaaggagtttcaagactcggacatggaattgtcagcgcggctgcgcgcgcggctacaccgctattccctcgatgcaggcctgttgttctacaacactggccccgaggatacgctccgcgtggtcatccctcatgatgaggacgtgaagtaccgcatcctctataaggcacatgacacgccgctgacaggccatcttgaccatgagaaggcctacagctcggtgagcacccactactggtggccgaagctttacaagtgggcgagcacttatgtgcgcacctgcgagacgtgccagcgcgtgaagtcgtcacctcttgctgcagcgccgttggcgagtttgcctgtcccttcgggctgtcggcaatccatgagtatggacttagtgtttggcctgccggcggacgcggcgggcaacactggagtcgtggtcttcgtggaccgactgagcaagatggctcacattgcggctgtgccggataccatcgatggcaaaggtacagcaacgctgttcttggaccgagtgtttcgacaacacggcctctctgagtcgattgtctcggaccgagacccccgcttcacgggcaactgctggagcgcggtctttgcggtgcttggcaccaagcttgacatgcccacggcggaccatccgcagaccgatggtcagacagagcgcgtgaatcgcgtcgtcgaggacgtgctccgcatcatttgcgccgagacgccgaagcgctggagcgccatgctgccactcgttgagtttgcgttgaacaacgccgtgcacgcctcgacaggctacacgccgttctacgtgaacagcttgtctcatccccgcgtcccgctgacgccgccacgtgatggcctcgggcttggtgggggggagaagccgatttagctgatcggctagccgatgtcagcccggctactgttcgtaaacaggttgacgctttcttgtcgacgtgtctgagtgtcttacgacatgtgcgtgacgcaatggctgagagccaagacaagcaaaaggaacatgcagatgccaggggcagaggcaatgttggaagttatgaggtcggggacctggtgttgcttaatgctaagaacctacctacacatgcagtgtcagccgtcttcaagacgaagttgcgcacgcgcttcatcggacctttaaaggttgtggccaagaagggccttgcgtactcgctcaatcttccgaagaagatgcggacgcaccccgtcttctacgtgggcttgctcaagtcgtaccaggacccgatgcaggtgcagatggaggcaccgagggtgacgaagtcacaggcgcggaggccgtggtcgtcgaggacacagtaccaggtgtcgaggacgcggccattcacgtgggcaccgcaggcacaggcggaagaatcggcgccggaggtgccgcgggcacagcgagagccgcaggcgcaggaggcgcagcattcggagcctgcatgcgggccaggaggtcgagctgaccctgaagcacagcctgctgacgctgtagctcccggccacgctgctcatcgcgatcatgatagtatcgcacccagtcctccagggccccaaggcggtcacagacctctcgaggcacctcgatccatcgtgtccgctcggcgagctcgtcgagttcggtgacagtccggcccaaacgcgcatcaacgtcatggatatgatcccgaaggcgacccgcctgctgccgcgcctccaagagctcaccttgagtcgcaaaggaccccacagcggcctccaccggctctgctccatgagaatgggaatctatattaccatgtggagcgcctcctggcaaagcggcggtgccggggtcaaaaccagtatctggtgaaatggtgagggtaccctcactccgagaactcatgggagtttgaggtgaccctccgccaagactgcccagacgtcgtggacgcttttgatcagcttgatcaccagcgccccgagggctcaaggctggcacgccggccgtcccgcgcttcccggcaataagctggggatcggctgggtcagccacattgctccgaggctgaccctgagccgcagcgctcactccctcgcgggaaggagcggctggagtgctcgaaggagcgaagcgcgcagcgctacacttggtctgcggctgggcgagtgccgagaggctgcgcttggctcggacctttgcgaaatcgaagcggagcttgcgttcaatgcgaacatctacttcactgaagctggctcggagagcattcatggagctgatcttccggctgtgctcggcccaagactcgaactgagcttcgtactcaattgagtcttcccccgggctaagtacctccgggtacgtccgcatggcgggcacggacttctgctgggcttgcagccgcagcctctcgcgatactccgcgacagtcgtagactgtggagtgaggagtcgctctcgcagagacgtacgcagtgcgagctcctccgtagtacgggccgcgggcccaatggcattcagcgcgagagactgctggaactcctggcgacaagcctccgcggggtcgcgaggccggacgtcgtagtcggcagtgctggggttcagcagaggccgcagctcggggcactgggagcgcatgggagccatctgcgccgcaacctgctcggactgagcttcgtccaaagggttggagatgacggggccaggggcacgtcttccgcacggagcggcgagtaccttggctccgtgagctcgcgcagctctgagagcccgaaggagcgttcagataacgggttcggacttcgcagcggtggccgcggctcctccttcgacggcgcagcgcgctcagcaggtggacggctcggcgagcgcacaggagacgtgcgcgcggagcgctcttggtcgcgacggctcggagagccaactgggaccggcgagcctccttcatggcgtgtcgacggcgtgggcgaagcgtcgctgcggctcggggagcgtcgcgtggctggggacgcatctcctcggttcggagaacccagcatggacacgtccacctcgccctcttcaccaaagagttcccgaggatccatgatctggcgggttgatgctcgaggggagctggggcttgcgcgctgtgagctgtgcttctggcggtgcgccgcgaaatactcggacaccgagagcctggaaggcgtcgagggtatgcgcgcgggcgccggcgttcgcgggggtgcggaggcacgcagtgcagcagcacgagaggagcgaggctccgaggcggatctcgcgagaggctgtctgcggtcgaaagaccaaaaggctttattttatgacttgaagtcatgtgagggcgcgttgcgccgagaagttctaagagacgtcctcgcgaggtggattgactcgttcgagaaggtggcttgacggaataagacccggtggttgaccgttaagcgtgaacacccgtgtccacggtttggtgggggagggtgtaacggagttacacgagagttacccgaagggttacgcagtgggtacacactgtctaacctaaatcagtaggagaatcagtacttggcttcagagccactgattatgcatatgactagggttcactatgctagatagtgaaccggatacatttacaccgtaggcggctttgccgcaataaagggaaatacattcagtttgagattcacacagttaagagttaagggttgactcttggagtccgtagggtgtacggactcgtacgttctggtattagaacgggctatcttaagctgagactctgtgagtctgtaaagcttactctgacgcaaagctacggcagccccgctgcactgacgaaaagcgcaagcaagagcggcgctgccgagacgccacgcagcaacagctagatctgaacgacgcgtggaagcaggaactatccgccattcagaaagagctacagtggctcgttcactgtcttgaagaacagaagaagagtaatggctacgcgcctaacagtgacgggtggaaacagagattcgctgtcgagtaggaggtcaagagagctgcacagtccgcgctggaggaagcgctttgtgaggcagctgattttcggaacgcaatcaccgagctgaagttacgcctagcgtccttcgtagcaggagcggcggcgaagcacgacatcgagctttttgcaaaacgttttgcagtccctcctcacggtaagacacacatctagttccctttagatcattgctcacgacttctacgtctactctatatcattaacacacttgcagatgacatttcctcaagattcaagcagcgcgtttttacggtgaacatgatgaagagaattcaaaatgcccgaggtgtcgagctcgacgcagacatctataacttctcgcaacagcggaaccagctatgccacgactacacaggaactaatgcgattagcattccgcacgaggattttcaagcgctctgcagcaaaattcgagcgacttgcatgcgacgtattcgcggtagcaactctagcccgcttctttgcatgttcgataacttaagtgagatcaatgtgagtttcaagaaaatctaaaaagtttttttctgtttgcacttgtttagtttttagtaggctgaaagatctcgcgcgcgacgagccctcgacagaggactcgaggcgcgctactgctctgttgtgagtgcagggcggtggtccttttataaaaagaggtgacacttcaacatggtgaaaaataattgagcttgcattgaattaggcatggtgaagagtttgagagttacggttcagtgaaatcatgtaccgtcgccttaccggtagaaaacggtgttgtgagcacggtactgcgtttcctgctgtaacggggtacaatcaagtgtacccattacatgaagagtgacgggtgtcactctcccgagtacatggtacatggtaccagtagctccgcaagccaaccattttagtttgtgtgggcttttgtatagttaacttgtagtttgtattacgaccaagttaacctctaccaaaatacagtcagtcttataacctactcctttgtagcaaaccgtttcctttgaggccgggaactggtgaactgctgttcacctggatagtaatatccgcacgcacttcctctgtgcattgtgctgtgtgaccccgtcacacttagtagcactagtagtcaatcctacgcctacgcgggtagattggtctaccggaatcctcggtggctcaggtctgagagccacgatggaccgcagtgagtttcctcacttgactgactcgcagttcgagtcggtgcgaaagatggcgggcatcttcggaagagatgccctccggagcttgacggcggcgacgccagccgagcaggtcgagcgggtgagcgcgtttgacgagtacgaacgcgggcgcatcgctcatgtgcagggaaacctgctggctcagataagtgagcccaaacgggtgcagcctaagcctctgcggctagctgtgcctccgttcgaagggaaggaacgtgagaaccttcacttctggatccgggacaccgagatcgcaatgagcgcaggtctcatctcggccgagaaccttcgagtcgccttcgcgctctccaatcttggcggacgtgccaggacttgggcgtatacgcgcgaagcgatgtcgcctggatgtttcacatcctgggctcagctgtgtgagcagcttcgagccgcttttctcccggcgaacaacgagttccgccagcgctcgcgcttccttgcctgcaaacaaggggagcgcgagctgtacgcgtacatacaggagatgtgcacgttggtaacctcgctggtggggaacccactgtcagaagacgtcaagatgacagtcttcgtggacggcctgaaggtcggtcatgcgcgcacgcagttgttccgcgtgcgcaccgccactgtggaggaggcgatccaagtcgctctccaggaagagtacagccacaagcaggctgttgctctggctgttgtacagcctgtggtcgctgacagcgaaccagaacccatggatctgagttcggctgagcagtactcagcccgctgctacggctgcggcggactaggacactatcaacgtgtctgcccatcgcctgggtctgggaagaaaacctacccgaagaccagagggtcaacggggcgccgacgccatgcaccgtcaggtgctcaagggggacacaaccaccagtaaggacgagggccttgctggggttggcccgagtctttgtgatgggtgtacggaaggcgtacaccacagagacccggggtcccttgcgagcactgacgctcgcattggtgaaggacaacggtgggttgtcggtagtacacgtgagtgtgcgggggtaatggtatccctagacatgattgagtctcggacgtcgcgtggatgttcgcacgtcgccagatgtgtcggttggaataacgacacaagtgccgagactctgcgagagagtcaaagcacaaggtcaggtctcattgactgaggctgggccgaagaagaaccttggggtccgctgtgaccctggctgccgcgctcgagggcgctgacagcaatggaaccgcacatggtcccggacatggaaccgtacatcgtcccggacatcgtgccgaagccggccctgggcatggaaccgtatatgccctcggcttgagcaagtatgacttggccctgagtacgccgtgcaagctgcacaggctctcggtcgagtagcgcgacaccgccttgaggctaagtcggccctctgtgtctgacagagcattggtgagtcatgttcccacctctggacagacacaagggcgtccgatggggccaccagggcgctggatgcgtccgccaagacgaagaagaagaagggaggcatcattgacatgctgatctccatgaagaaggtgcagtgtatctgcaaccgagggctgttatgcctggcatgtggagctgcttcaacaagcaactccagcgctgagagtcattgctcggcatgagcattgacaagggttgtgttcgatgacaccacctggtgggtaaccaaggaccactgactagcgggtaacttaattccgcacagagcatgtaatgctgaggaggccgctcaaagcacctcaggcgtgggtaaccaagtaccacggacggtcgcccagaccttaactgaagaggaacgcgctgcacgcgcttcctgtgtgggtaaccaagtaccacacccggtcgcccagaccataactgaagaggaaggcgctgcaggcacttcctgtgtgcgtaacccagttccacaccaggtcactcagacctaaactgatgaggaaggtgcacgatgcacttcctgtgtggataacgtagttccacacgatgccgtaaggctccgcatgagccggaaggagtcgctcgaagcgacttcagcgtgggtaacttagttccacgcacggtcagtatgagcaagactagtgatcaggtcacttgggtctcctcgcgtgtggtggatgaccacacggagtttaagaggctcgtgacaccgtcacgatgtcatagccgcacggtcctcttgaaggcgccgcgcggctttgattttaagcgggggaggagtgcgcggaagcacttccttcctccaagggcttggcacccggtcatcatggatgacgttcgactgggtgtcgaccagcgcagctgtggccatgcgcacagaagacgtggcttgggtacacgatgtacctgcggcgatgcatgttgcgtcgccgccgactcggcgagcatggtcgatcacgactggaacgtgtctgccggagggcgacacctcaatgaccacatgcaggatcatgctcggtctgaaggcaaaggccgctgcgcggcagggatcgttggtacggtctgtcgcgcctagcactgtgcggcgttgggacaacaagtttccatgactcggtgccgagatggctgagtctgagtatgcgtgcatgccatgcagctactctgaatgcgggacaagccgtacgctgtcatgggtgtcattgcccgaagacgtgggtaacatagtaacacgtcaagtcacgcagactcaaactgcatccaggctggtagatgccaagccctggtcgacgatgttgactcagagccaaagaagggtagctgcccgtgccaccggagtctgctggcacggtgactcggtgctgcagggcggcgcgaggttaggcggccggctggcgcctgacccgccggggctccaatcgtaagtgggggaggggatcggaagtgcctttcctcccgaggtctctggcatgagacttgcttcgtcgtagaagccagtgtagtggctgcatggtgtagccactcacgaagtattgcacgaaggtgctggacctgatgcatcgctgatcaggtcccatggtcatggtgaccgatggccagcaaccttggcagcggctactgtcgctgctgagccgaagatggcgcgcgcattcgctgctggaaggctgcctctgtcaggcaaagacatggcagccagtctgcggcttggtccgcggacgatggcatgtgtacatacgcaacaccatgccgcagcgtgacgctgttgcaacactggacgcggtacgtctaccggccaggtagccatcagcaccacgccaaagctccaggctgttgctacgctggacgcggcacgtctgccggccaggtagctatcagtcccgagcatgggtgttgtccacgaggggagaacccgaacgtgttgcctttgcagacattcacagttggcgcggcacatgccgcacctgtaaggcgcgaagccatacgcgtgcacgcggcacatactacctgtgagatagtcgcggtacgtgacgctcactgtgcgcgtggcacttgatgtacgcgaggtacccctagtgcacgcgacactacttgtgcacgtggcacttgaggtgcacgaggcacttatggcagtcgtggtacgtgccatacacgacgtgcctttggtgtatgaggtggtgccctcgtaaaccttgaggtcctgtatggactgtgccatgcggtcttgcacgctcaccgacctggtgttggtcgccgcgacgcaggatgcgatcgccggtgacggagggcaatacaccccacaccacgatgaagtacccttgcggtaccctggtgtcgaagaaagacaccttagtgtcggcgacgtgatggccgtgacgcgctgcagggctttagacaagtccgccgcgttgctctgtatggtgagcgggttgctggaagcagccatgatcgctcaagcaaacacgacgttgaagcatgacgcttcatggctgtggtcagcgcttgaccatagtccatgggtcgagccgacgtattcggccgaccggcacaccgtgctgtgacgagcggggccctgttgggccgctgtcatggccggagatgagcagcacagctctctccatggttacgctacgcgctgaccggaaaggtgctgtccctcgcgggaggcactgcagcacgaacgtgccagcggggcccgagggccatgcgacgccaactgctggttgtctatgagggacaccgcaagtttggaggcacatgcatcccgtgccgaggcactctgcgcctgctagcgctgtgaatacggccactaaaggcgtcggcttcgcggccaacatcgccgagggcaggggggttccgcgcagggtgcccgctgcgggcacaagtcactgtgggcgtgacgatgaggcgcgccagccttgcggcggcagcgcccgagaatccgacctttgggtgttcggattctctcgaagctgattggagaatcagatgtgattctcagataagtgggggaggatgtaacggggtacaatcaagtgtacccattacatgaagagtgacgggtgtcactctcccgagtacatggtacatggtaccagtagctccgcaagccaaccattttagtttgtgtgggcttttgtatagttaacttgtagtttgtattacgaccaagttaacctctaccaaaatacagtcagtcttataacctactcctttgtagcaaaccgtttcctttgaggccgggaactggtgaactgctgttcacctggatagtaatatccgcacgcacttcctctgtgcattgtgctgtgtgaccccgtcacacctgccctaacgatagttcttacgaactaagaaaatttaggctgcctagtgcctgatacaatatggcgtaccattggaatggtatactctgcgacaagaatacctaccttcaccattgaatgaaatgtgtctgagtgcaggcttatgcgtggcaagtatgggatcgctcaatgatggattggtgtccctttctgtccactgggcagtgtccagggccatcacacatccatccacgctccttcttcacgcttttcatttctggttttgcgcgggtggcgaacaagtagctcatttgttgcgatctcagcatggactcggcatgggcattcctggcctcttggctctccgttctgaaggagtttttactgccggaaagcaagccaagaggtctcgattgggaggtgatgttatggttcaagtgctcgtacgaaagcgagaagcggctgaggatgcacgatctctccatgaagctttccttgaatgaagcatgccgacaagaccgagcaaagctgcagcgacttcgtgaggcgatagagctcttcacgatgctggcatttgtagacaatgaagcgttccgggaacttctccacgccgatacgtggttccacgactttattcagccctatgctcgaggcgaagaaaagttttatcccgagtggctgctctacctcgtcgaaacaccatcacccgaagatattgctgcaaaccagacgccgatatcttggggagcgctgcttggattcccagacgacccgcgggagaactcgccggaatttcagacagcaatacgcgcgttggaagccatgggtgtcggagaatctgtaaaggggcacaacagtcggttcgctttcacgtggatgattggacactttggccgtaccgaagtcgagggaacgcagacgtcaattctgccggcagactcgccaaatccgttctcgactcaagtccgcaaccttttggatggtctggttcctccggttgttcaaatgcgagctgtccgccatagctacgcgatagtacagcaagtagaccctccgcatagcaacctcaaggtcgtgttgacgctgccagggaagaatatggatatccccgagaggacaatttgtgagagaacgctctcgttagctcgaacacctacgaccaaattcactttaggcctcgaccgggggaacctcacgcccaaagttgcggtggatgtgggcttccagctgagtacattgctttgcagtcatccagtggctggtgcaacttggaatgcccaagtctgacaacctgtttcacgccccgtcgaatatgaacaattggaattgaagtgcatcgcagatgaacagagtgttcccgcgatctgttcggcagtagcggaattgtccttaaccaaaaaggggcttaagtttacagcagtagcgcctacgagcgaagctgcatggtcatggttggcgtacgccttgttctgtggaagctctcttattgatattgactcggtggagattcatcgagcctgcttgaccaattcacacgtgctggcagtaagagatgtactactgcacaagtatcccaggcctctatccgctcaaccgcccgatcaaaacccggattacggatttgtgcacttgccagcgggaacgaaactttggcgtggtggctgcaaacgtgacgaagaccccaatttggttacctctgctgcgggccgctaccgagctgtgtacaaccctgccaacgcgcctggttgggtcgagcttgtcgtacctggttatggaatctgcactacacaaatggaaggcagcgagaaagacaagttcatttcgtccaaaaacacgccgtttgaagagtaccttgtgcaacggagttcttcccttacaatggggttcgcgtcgatggaaaatgacacagtggtgacacagttgctcaagttattcggccgggaattgaagtcgctcatgctcatgaaggtgaacactgagatctttagaaggccagtcactcgcgacaaccaagtacagctggaactgagcctgttggctgaagcgtgtccgtgtctgagagacgtcgtcgtcgcaggtttcaacgtgacagtcgctgccgacagcgaggctctgcggaactggcgagtctatcagatgttcttactggcatcattcgacgtgcccgacttggcatcgtatttggcagactccacgcttcgactgacacaaaacctctgtcagctggagatcacaactgcgtcggttgacacgaaagaagcccaaactctgaaggcattcgatggagacttcttgcccaaacttcgcgtgactggcgacaccaaagccaagctggccatggtcagcgtcgtggaagtttacaacggtgggaagtcgaaggcgaccggtcacctcgactcactcatcttgagtctcatactcaggtttgcttcgacgcccgtctaccgctcagttgttgttgacggccttgataaagattaaagtgaggattttcaagctgaaacgcatggctcgatgtacgaacgaggtagtacatgaagcggcttgagcttgcaactaccaactattttgtttttctttatatatacttcgcagtacaaattttgtcattacacgagcccagatttatatggttttgttaaagaagcttgtcatagtgctctgaagcagttccgattgagtgatccacgtgtcctcaaactcatacctcgttgaggcgagcgcagccgcctggacgtcgccctgttctgttgatgtattctgtactagggcttcggggggctgagataacaaaaataaactaaaacagataataagcgcaaagcgcacaaaagctatagccactacgtgtccgtacgtaccgtatacgagaattcctacatcctacttttctcctaaagcgcacctgatccgtatcacaacagcggtatataaccagaacatagcatacaaactcaagatactaaaaatcaaaatagaaaaaagacagccaaacttgtaaaatgtgcgtgttcctggggtaggatgtaggaattctcgtatacggtatccccggcgctaaccacccacctagttgcaaagatgtatgattgaaaggcaccagtccaccacttaaaatgacatttcttgccctcggccaaaattttcatttctgctacttagtactcattttcctttatcagcgatggatcaaacgtgggcgttcctggaaccttggctgtctaccctgcgggagaccctgttacgttatgggaagcctgagcctcgatgtcctggatcggagctgcaagtatctctcgaaccgctttaccccgcagtcgtagtctttccgagaacagctatgccaagcctattttacctccgactttcggtggatgaagccgatcgacaggatcggaagcggttgcagcatctccgcgaagcgattgagctcatgtcgacagtggccatcgtcaacaacaagacgttcacgaatttcatgcgggtcggcacgatcacacactcatttttcatgccaggcagagttttcacctagcacccgcagtggattctctgcttctttggcactttgtcgtctcaagatgctgctgcgacgcagcaccgcgtaccatttggcgccctgctcggctgtccagaagacccgtggacatattcggccgagttccgggaagccatgggtaagctggaagctatgggcttaaacgaggctctgaaggcgtaccatctcaagaatttagccctggaatgggacatcaagagctcggccgccaaggttggaggccgacatgagctggatcttccggaagatacagcaagaccgttctcagcccagctgaagaagctctttgatgccgacgtaccccccgtggttcaattgtgcgcggcgggaaatgcggatgctgtgctgaaacgcttgcaaagaacgcacctggcccccgcccccgctatgacagcaacgcagttgtatagcaaaacgacgggcattggaccggtatcgtcttctaccacattcgtggagagtttggattgcacagcgtcggggatacctgaattgacaacggcactagcccgaacagctattcagcatttatcgctcgagtatggtagtgacgaagatgatgctgccacacctgaatcggcgaagagtgcagggtatctgttgagtacggtgctttgtggtcgcttcaatgtgtgggattacgctagggcatcgcagctttccgtctatcgatcgcgatgtggagtttagtgagctgacgttgaaattcagatcagtatcagatggtacatttgctgcgatctgctctgctctggcagaactgcgtatgatcaagacggtgacgaattttgacttcccacgagccgaatcccctagtcaagatcgcttgtcttgggtgatctatgcactctgttgcggaccttggagcgtgccaatcgaggaactgagtgtcacgggcgtaggcttgacgaaggactccctggataccgccaaagcagcgttgaagaacaacttccctgatgttgttcgtggccagagaactgaacacctctcagaatatggagtcgtcgaaatgcaggaaggagcacagttgcgactcgtcttacccaatggtgaagaaactagcctggtagtgtcaagtttgactcgttgtcgggcacgatacaatcccgcaatctctcctggagatgttgacgccgttgtccctggatacagaatttgtaaagtgatgctgaaggatggcgtgagtaaatttactcgggacgcgcaagagacttcgtgctttgcgagacacccgtcgggccgcgttcactcgctcacgctgagctttgatgtggtcgaagatggcgcaatggtggcggatttgttgacgttggtctgctggcggctaaagaaactttcactcaagaacgagccgtcagatcacgctaagctggatctcagtgcgctcgcggaggcttgtcccgctctagaaggcctcgacatcgaagatttcgatgtggttgtgactgtagacagcgacgccttgcgcgtatggcctatccagaagattgagatttatggttccacgagcgtcccagatctggcgacgtgtttgagaaaccactcgtatcgaatggctcgagagctagccacgctgtcagtgtgtagacttcatcattcgacgtgtgataccagagaagtggagtcgcttaatgaacatgacggggatttcctgccgctaacgaaggagaagttacccaacgaggcgaaggccgcactgacaagtgtcgtgaaaagcagaaaaggggggaataccccgactgctgtgagcttgttagatgcaatgtgtctgagtcggattttcgctttggcctcgacgcctgtccaacgttcggtccagtgcggcgcgtaatgattcgcttgatagtaaaaaaataggtgttttgtacaagcgcagcggtggaaaacccatttttcgagagatgaagtgagccacgttttcaagcccgaactcgacaccacgacagtccacggctttgcactaggcctgcctggccagcagtaggcagcttagttttagttttagggggcggcgtttctcagctagcttgcgtgcaggccaactagctggccgactttaagacccaccacaccactcccggggctgcctcgcacggattcactgcgaacccgctgcgaggcatgccttcggtgatctaaggacgttcccttttgccccaaacgtgttcacggagaaggtttgaaaaaaaagtctgaaattcacgtggactgtcaactgagaatgcgtcgatgttgttgtcgtagtaagaagattttgataggatatacactactgaaatatcgctggactatcgtagtcaacaaacttatgtgatggcgtcaccacgcattctgaattttgcgagtcatggcggccaagtgggagttcgtggagccatggcgggctgcattggacgacgtttgatagaagaatactctcattctgatgaaaactcactggaagttgtcattctgctgtccaaagaggaactcagtcatggcagggggaatcagacgcatcagattcgatgaggctacaatagcttcgagaggctctcgagttgtttgagctgctttctcttgtgaacaacgaagctttcaaggggcttactattgatccggtggcgattcaatttcaggatggcaagcatcgcgtgtactgtccgacgtgggatctccgattaattgggaaatccgtcatcaaacatagtacagactccgccttgcagaatcgttatgaagtggcggcagactcataatggtaaatcttctgcatagacctgctatcgatatggtacaatgtcattcatcttggctatgagttttccgcaacgtccacgactgtgggcgacctgcatctatggtcgcatctgctgcgccttggaagtcggacaacttcatttatacgtccaccagagcctcaattgcttgagagacgaaacgagctcgttggatccattttcaaacccttgttttgcatgggactccatcacgtaataagtgatccatacttcgattgagaccaaaacgcatgatgttgacgcctacgagctagagcacagcattactaaggtggaagcactagatttgagcgacgtgtcggtatatctgataatcccgtacgtggccagcaccatcggtccgatgtattacgcaatgaagtttcgatgccgggagagaacgcatatgcgttgtggatagtaatactgtacgcacactggaagccataggcatcgaagaatcgataaagcagcacaacaaaatgttcgtacccagcttgccaataactagcgcaacaacttcgtcgagttatacagtggtagctagcaaaacgaggcgcccattaagcagttaatcaacttcttcttcttctttttctttttcttctggtcgtacccagcttgcgaatggtgatagaaacgcgttttgaattcttcgagacgcgagtgcctgcgttttgtgggtcttctagtaatatttctcactgtcaacaagtcaattctccgatttactcgcgttgacaccatgcagatcccaaaattgctaattatctgcgtcggcttgctcggcggttccggctcggtggcggcagtgtcaagactggggacatgtcataagttcagtggtgctgatgtaggatgctgcgctaacatcctccctgacgggtgctgctctggatgcgcccgggtgaacgtggaccaactacaaccgctgcgtgtgctagctcaagagcagcaagggaaaagcgttgacggcttccggctccgtctcaggtttttctatgctcactctgacgaacccaactctggaaaaccatatcgacgccagcggctgccgctcgatttcatcgagtgcggtgcgtcctcgtgcactccaagataacgactgacaagggctgtatattctagcgagtaagataattaaacatatggacacttgcgagcggtaagctgcgcgatacactttgttccacataaattcctgctctcgaaaacctattggacgtgtatagtgttaaattttcaagttaaccctcaaattcaaaaagtgcacactcaaataatattcggggtacccggactggtggttcgggggattcgcagttctcagagcgatatagaattccgacagcaccgatactttcaaaaaataaaagtgcgaccagggcactacgaaggtaattttcttaaatatattttgagtaggaagtacttcgaagtatactttagtagcggccatctccggcgcctgcttcgcagccgcagcatctgcccggcattatttgaaagtaaaagaaacagtaaagaattttaattctaaaacaaataacacgtgtgctgcgctcacattggtgcctcccgtaatctccgttatctccctagacgcttaatgacacaatgagctcgttgataagcagcttctccgccgaattgtgcgtgctgtaacgatgtcgcctgactgtagcgcgattgtcgctcgatggcaaactcgcctaggccgcctaacacagttcttcgaactgcgaattaaatatactcacatcttatgtgggcattttaatttctccaagacgtcaaaccttgcagcaaaactgttggaatggtctgttagtgtatgtcaatcaatcaatctgtgagtcatctatgaggtgatgtacaattgtagtatttgtaggtgcatcttgttgcgtttatttcatactggcgcgttgccggatatgccgcgcaatcacttcaacggtggggtggcgaagcatgtttaggtgcgtacagttttgtagagtgacgcccgtggaaatatcaatccccagagctcgatactgagaaacgtctgcattccagcgctgagtcatgtacaagtccgcgctcagccagatcggcggctcagagctacgccccgtctccacttgagcagccgtatagggttggtaggtctcctccatggcgcaaaacctgcggtaatttacccccagaggtcggagtagctcgtcgctaaatgcttcgaccgcgtactcttcaattcggatccgagccgctgcctttttggctttggtaacttgctgatgggtggaaggcacctcgaaggggagaccatcgagcagaataagcggcaagatatcatgcccttgactcacagctagacgtgatacctcgtgtgccacacggcagccaaaggagaacccaccaaaagcataggggcctttaggttggtgctcgcggatgttgtcccaataacctctggcgagctcttcaacgctggcagattgtggtttagcaatagcgtcagaatcagtggtagcttgaacaccgatgactgggaatggcagttgtctagctaactccagcaatttccacactgtgccgtcagcgtcatggaacaagaacagagtcggcatcacgtccgacgacttggtcgtaggccaattgagcggcaccagcgtttgcgatgaccatccacgtaaatccaccatagaagctgcagcactgctggccatttctggcagcgaggatgtacggaagaactgttctagagacaacgacagcccccgcgcttgagcaagagcaatagcacggatagccgccagagagtcaccgcccaactcaaagaacgagcgggtcatcagtcgatcctcgagctcctcagcttcatcattttcttggtcgttgaggtggtcgaggccgagaacttggatccaaacttgccgcaatatgtctatcgccaattgcaccgtgactgtggagccattcgaagtaattcctccacggtttgatggctcactattactcgaccgtgcgccagcccaaccagccagagcgcgcagatcgatcttcccgttaggtgtccgtggccagctacttacgactcgaatggattgaggcaccatgtgcactggcagacgatcacggaggtagacgcggagcttatcaatatattcctctcccgttgatccgtcgttgacgcagtcgactagcataacgaaagccaccaacgagctcgaggaggtttgccgctgctttcttccaggagatttcggctgagaaatggacagtacctcagccgttttgatactcgagtaccgtagcagcacattgcgcacttcctgcagctcaatccgcatcccatggtgcttcacttgagcgtctgtgcgtccaaggaagacgagatctccactaggcaaccacttgaccaagtcccctgtcttgtaccacctccgtccacgctttgggactatcgatgcgatttcgtgaagatcctcgtgagcaatgaaagcctctacagtgaggtcaggacggtgccagtagcctcttgcaacacctacaccgccaatgtaaagctcgccagggacgtttactggtactagccgtcgctgagcatcgagtacaatgacagggtgatcgtcaatgggttttccgatcggaacgctctgtaatccctcaatgatactcgaagtgctctgcattgccagctctcgaggcagctggaacgctgttgacgtgatagaagcctcagtcggtccgtactcgttgactagacacgccgtgctgtattggtacttgcggtagaactgccttgccagttcaatggggaaggcctcgcccgctagcacaacgtgtttgactgaggtagggaagctgtcgcccttgtcgcttaagaagtccacgatcagcgcgaagtatgaaggtacgaacacacagaatgtgatgtgaggagcttccaacagcacattccgcatgtagtgcagctcgtgcaagcccttcggacgagtgattcgaacgctccctcccactagcagaggcgaaaagagctgggaaagtgaaccgtcgagtgttgttgatgtgctctggaggaacacgtcgtctgaagtcacctcgtaggtccgcactgtccaccagagcgtagtcatgagagcagcgtggggaactacgactcccttcggattccctgtcgactgtaaagtagagagagttagcctttgatgagttgggcggtctgctcatcaagtgtacagtactgcagacgtaccccagaggtgtagaggatgtatgcggcggctttatgagggtctcgcgagtctcggctctgggatcgaatgtcgtctcgtgagtgcccgtagagcgaagtcagggcgtcgacgtcttcgtagcacaggacgcacggcgacagatcgtcggcatcttcagagccattagtcaccgaggccgacaaatacctagcgacttcatagtgtttctgctgtgtgatgatcacttgaagcccactatctcttgccatgtagcgcagacgctcacgtggaaattccgggtccagcggcacaaagacccctttcaaccgcaaagtacccaccatagctgcgatattttgcagccctcgatccagtagcagtccgatatgcagctcagcagcgcaacctggaaggtcgagcatgcacagtgcacgcgtgacgcgtccactttgttcccacaggtctcggtacgtccattccgtgccttcaaagtgcagtgcaggactatgctgcgtcttctgcacttggaaaaataaacactcgtccaggaaactcgacggtttatcgtatgacgaagagggaggcttcggcatcccccacttggacacgagttgccttcgttcagcctcggacaacatgcaaatggttggagatcgcactacagccgttggggcattggtgacctgctccaataacgtcagatagtagcccgtgaatcgctcgacagtgccccgagtaaatcgggcggtggggtactccatcgatccttccaatacacggtcccctgcagctcctcccttgagttggcgatagcgcatggacagcatgaggtcgaacttcgccgagtggtgaggcagcgagagctccatgtgcttattggcgttagacgagtcagcattgatgtcgtcgtcgctgttctcccatgagaacatgatctggaacagtggatgttgccatcgtcgctcagcgtctccatccacgtcgcggttgctctgagctgtcgctcgcaagtgttctaggaccttgtggaaggggatctccatgtggttataggctccgagcaccacctcacgcacagaggccaggaagccagtgaagtccgcaacctcactgcattttactccaagccgcaacgggagtgtgttgacgaagtagcccataacgtcctggagctcgtcacgtacacgacctgaagagggagcgccgataacgaaatcctgttgaccggacaagcgctcgatcaggaggtagaagacggtgagaagacccatgaacatgctggcgccttgggcgtgacacagtgcagagaaggccttctgcagcgcaggagtcgatctgaaaactactacgtcgccctctgtagtggtcgatccaggcgctttaggctcgtcagaagcactagatatagctgcttccgagtcgaacggaagctcaagaagcgggggtgcaccaccctcagtgagctgctgcatccaatactgcagcgccggcgccattatcccggagcgcattcgaaagcgctgccacactgcgaagtcttggtacgtcacacgtgagccgctagaggcctgagtctccaactgctgaatgaattccgtcttcgaaaccatggcatcatcgctatgtcggaaccgattgtgcagctcatgaaagtcgttccagaagatctggctggaggctgcgtcggtcacgatgtgatgcagcactacagctagaacccactgcgatgttgggctctgatctgggctaacgagcgcgtatacgcgaattggagcttggtgtgccaagtcaaagggttcgtccaccacttttgccacaagtgcagcaagttctccatccctcgacgagtcttcgttgcagcgagaagctaataactcgctttggatcactccaaagacccccaatttgccttgaaaataggtcaaagggtgcacgatttgtcgcggttgtcctccagcgttcatgtcggcgtcgaagcatgtccgtagggcctcgtgcttggccatcaatgcgtggcaggcgctctccaacgcggtcaagtccaagggaacgtcgcaaaactgcagcgctcgaaccacattataagccgtgctagatggctgcatcctctgcaacgcgaacatctgcagctgcgagtacgacagctcgcaggtcgctttggccagtcccggacgaagtgtgagggtgtcttcttctcggtctgtgtcgtggtcactgagcatctgcaccactgcgttctgtagcgtcttcagtcgtcgaattcgagagcggttgagtgctttcctgcgcttggttggctgctggtgacggtctccgttctccagcagcagaagctgcagccaatgcaccgccacgtccacttgccccgcgtcgagagcgcacgtcaacgccgccacgtccaccgcattctcattggtgttgtcgtgtgtaccacttgccctcgctgcgtccgcctcctcctcctccgccgagcgcattttcctgcctgacaaggggcacaggcacagtcagtcgaatcagcggtgctgctggcagttgaaaaccgttacgaacacggcatttcttagccaatgggagggcggcgctattgttgacacgcaaccggctggctcgaagttgaagaggattgtcatattttatttttggttatttggcttgcatgctgagttcttgttcacagtacgagcagcaacgttgcaggtatcaaggcgaaaccacatatcgggctcaggatgttgccagtagtagaacggctcaccctctgcattccaaactacgtagttcttggtcccgttctttagtggcgccactacacgccagcttcgcaaatgttgtgaattcgctgtgtaccgcatcgtacttagcgtcgaaggtcgcgcatgtccagcttacactggcgattcatgctctttcataagacgatacttgtcttcagagtactgccgtacgacgttgcgtcttacgttttccaatcaacgcagtttggcactatcttgatttttgtatacagctgactacattgctaattgtccactgaaacgtaagacagtttgtcgtacacgtatttgtctcgtaccattggctgaaagcctattcagttcgtacagcaccccgaagagcagacccctccccatcctccactcagccgtccttcccatgcctccagccacgtccgcagagcagccacccccccaaaggcatcagcactgccgtcgggcagccaacgaacagcggcatggatccctcatcccgcgccagtgacgctcttagagccgagaatgtacgccgcgcgtgtacgacctcgagaacgcagcgtgcataccgcagctatcgccacgggatagctgcgtggatccgcgagtctaaggccgatgcagaccggtatttcgagcctggtggtgaaattgacatctccatgttcactcccaaagatttcgaggcgtttttgctagctaagatgaatgccactgagaagaagctgaaggtgaccacactcagtggttataggagcgcagtcaaggacatttaccgacagaagaagcttcctctccctgctgcgtacatggacgatatgaagacttttttcgctgggctcaagcgcatcgaggcggagcgcaaccaaggaagtgccggcgaggcaaaaatggcgggggaaatggcgctaccgtactctgtgtacgagcgagtgtgtaagcagatgctcgtgctaaatgacggtgggtttgcccacctatttctgacggtgcagtggaatctgatgtgccgatctcagtcggtcgaaactattcacaccgggcacatgagtaacgaagacgacagcatcggcttcgtctttcataagagcaaggcgaatcaagatggtaaaggaccaaaagacccccgacacgtctacgccaacccatttgctccatggacatgttgcatcaccgcgctaggggcctattgggcgtgctaccctcgccaaggcaccggtccgctgttcccaggctccctgcaacgcaaccggtttcgcaaggcatttgcccgcgccttgggaaatgctgacaacgaaaaaaactatgggactcattcggtgagaaagggtgtaggccgtcatacccgccgaccaacccaactgaaagtcgcgactattctgcgtctagttagagaggcagagcacgccgacaacgcaaacgctcgtactatagacaccggaaacggagcaagagagactaagaccaacttaccagcacgcagtcgctgtcgtcttcacctcagtacaatactgtagcaacagcacgtattagccaatccaatccctagatttgctctgtcgtcaaactgtcttacgaatgctcgacacaagtgattgattgaacgactcatcgagcaagattgatgctactcgactgtcagcttcgagaaggtcacttggagctttgccgatacattgacatgtcgactacgtgggagtttctggagccttggcgctctgtattgcgcgacaattcaagagaaggatctgcgcacgtctccgaatcggttctcgaagtggcgtttgtcgttccaggccggcacccattggctgaagggaaaagcatttaccttgaaatttcgggagaccagtgcagtgcgcaagcttcgaggaggctacagcagcttcgggaggacatggagctgttcacactgctctcggttgtggacaatgaagcatgcaataagctcgttttcgcgggaactgcaaccccgtccgtttactttccagaatgggagttccgactcgctgagagttcgtcgtcaaagataccccagattccagtcacgtggggcgctttgctcgggttttcggatggttcgtgggggtattcgcctgggtttcttgcagctgtccaaaacctagaggcaatgggagtggacccgtatattaaaacgagtgaggatgagcggtctgcgatttattggacggctagactaggaggatcaaaagtatttggcaggcagaagtccgacgaacctgcagacctatcgacttctcctcgtgtccaacttcgaagactattcaatgccaatgttcctccaattgtggagctggctacgggctgtggtggagctccgcttgctgctccttcgatcccgccacgttaaggagagggttggtgtgagtctgtgtacgctgtgatacggaattgggtcgatccagtcgtcccagagctggcggttgcactgactagaaccgcaacacaatacctttcactggacctcgaaaatgctacgattaattcacaccaagccatggtgaatgctggtcttttgctgagcacgttggtatgcgggggtgaactgattttctatagcagatatggaattccagtaagagttcgagaactagacctatgatgctctggggtatgcgatcggatgcttagctcaatctgctcggcagtcgctgatctttcaacggaggcagatgtgacatacaattcagtaagctcggagcgatggccctggctgatatacgcgttgtgctgtggatcttcagacaccattgtcacggtagtcacgatttcggtggtaagttgaaaaagtcggatgttttagccctctccgcagtacttcagaacaactatcctctcccaatcttagaagcgaatggaaggggctcccacgcgtacgggtttgtggacattcgagaagggaccgagctgtatccatctggagtaaatgatggcagtggcaatagctttgttttatctagagcccgtcccttccgagcactctacgacccaacatataatggatcctgggtcaacttcgtcgtccctggatacggaatgtgccatgcgaaacttgaacatggcgtgaaatttacacccgatcctgaggatccagtttgcagagagagacgaattagcgggtcgctggcactaaactttgtcacgttcgagacccctgctgtgctgatggagttgctgacgctggtaacccgcggcctgcgttcgttaagactacttgctaacgacgacgctgcagcgtcgatgggtatcgatctatccgcgctgtcttcggcatgtcccggtcttcaacatttgtcgattacaaaatatggtgtagtggtgtctgaccacggcgggtctttacgtcgttggcctatcaagacgatcgccttacgagaatacttgtctgacttgatcggatgcttgagggacaccacgctacgaatggctcgatcgtcaaggttgaagtgacatctcgacgacgtataatatttgaggaggagatgagggagctcaatgccttcaaccgcggtagccggatttttaggtcaatcctacattttggtcacgtgtcaaatccttactttggtcacgtgacctaagggaatgaggtcacatgtaattcacaaacgatcaagaagctaagtaaatgcattatatcaattctgctgcaacgccatcctgaacgataccgacttccgcaccattatacaattgctgatgcatcgccgtcgtagtcaaatgagttatctggactgtagtctgccgtatcgtgatccatctcagcagcgtcgtcctctgaacccggcgcacttgagcaggatgcagggtcatccgtggcgatggtaggctgctcgtcttcgtcttcgctttcctccgaatccacgatgtcgccgacctcaggcaactgcggcgcacgcggcagctggaaacgtttccgttgaggtggcctgacgagcccgggctggatagcaacacgctgcgccacatattcgcgagaaatacgctctagcgtgtcgacgaagatgctcatggcagggtgtggagctttgatcttcccgttcagatgccggtgaaagcgctcgagagggttgttagtcctactaacaatgtcacgacgcatgccgaacaacgttatccaggtcaaatgctgcacgcccgtccgcaagcttgcgatgtccgagaagataatggtccaagaggtatgcaagatgagctcgatggctatagtcaggtgacacgttgctgctgcaggataaggcgatactggagaatttcgacgagttcgtgaaggtagcaagatcacgaaatgggggcccatctgaagctaataggtgcgtatctgtagggagggggagggctctgtcgacgaaattgatcctgcagaagcgatgatcacgaacaactttgaccagctggacaaaccgagggctggttatcggaaatggtcttccacatgagatgacattcatgaacatgtaaactagtttaggcaacgagcacatttcacgaccttgctcgtaggtcgtcaaggatagacgcaagattgatcctaaagtgtgtaccacttctagtactaagaaggaagcaatagaactatcaatgccatcacacattagttgaaatcgatgctattattcagcaagtcacgttttactgatctacctgcaaattcaacgcgggtggttccactgtagatgatgtttgttcctggtctcgtctcacttgcgccgaaatccgctgttgatctttccattgcttgataaaaacggcttgggctcgataaatcggagagctccgcttgagatttccatctggggtgaatacattttggggggggggtagaactcgtgaaatttctgccaccacgtccaggtatcgttttggcgcaagtgtggcttcaacttgtcggtcggatatgtgcgtttgcacaacgagacacggtgagcttcgtaatagtccgtcttctgagtagctggtcgacactcaaaccgacacactgtacactcgcgcattgaccggcttcgacccttcaaaactatccatgcttccttcgccacacatggcgccagagtatctcgcgaagctgcagtagcatcctgcgaacacgctgcaggctcttgcaggttcggcgcagtcttgtcgtttatgtatatcatacctttatcattttctaaccatcgcatccaactgccatcaaaaagctctcggaccagcgaaagcacgaagaaccgatgcggatctcggttgctagaagcggatgaatcaccaggatcgtcgtccgaaccatcgtcacaggtaggcgttttaccagccgcaagctcgtggcatatgtatgcattgcagcgcgctatgtctatcatagacattcccagcttcttgtgccaccttttaaaggtgtgcccatcggcaattgagaaccggcctcgcaattggtcggcgcggtcaacgccttgcatttttctcgttataattcttcacacaggcaggagcagggaagggcacttgctcctcgatgcatatttgatacagcggaactatcagcgttggatacgacgttgacgaccgacccatctacccagctagctgccacgatgtgtttttcagtggatacgccttggttcatatcacccctctccgtggtctcgtcagcggctatcatcgtaaacttggggaagtgcttactggtttgacgaacagttccgcgacagtagagtccaattgtccgcagtgattccagcaacatacaagacgtgtataagttatcagtgttgacgatgtgccgtgatccctccaatgcagctgtcacttcgattacatgagatcgaatatgccttgattccgcgtcagttcggctacacgcgatatctctggcgtagacatcactccacctaacgatcctccagttcgctcgcacaatgaagcttgaaactaagaactaaccacgtcgaagaacaacaacaggcatacagcttgaagtggtactttcctgtcggcttccgagggttatatacaatgatgtgccttgcgtagcgcgaacgacaagcgatgctggcttcgtcgacggctacatccgacccacaatcacgtgaattgcacaacggcgtttcagtatgctgatgagcggtataattcgtgctgctggatctcgcttgatttcttcaatagtcactgctgctcgaaatgacaagtgctttcgaatgtacaggaatcgtttccacggcataataatcgccagactagttgatcgggcaccgggtaatgctgatgattccccatcatctcgccagtaatttcgcatttcaccttttttgaaaagctgcataaaccacagaatacccagaaatctcatcatctcattcagtgtaatcgggtgacgtgatggttcccctgcacctgatgcgtgactgttagtgaacgcgactacctgcttccagaatgaaagtggtaggaaggcgaaaaaactcgacgtagcggagtggccaaataggggacgactctcctcacgaagtttggttgtagttgaaccatcgggatgggtaaacagcccgggtggctcggaaagcgtttcggtcgtggaaaaagtcatcgcttcgattgcttctacttcggcagggcaaaacggtatttgcagctcggtctggcttcgaaaagcatacaattctttgtagcccttgtcagtcatttcttcgaactcttccgtcaaagcaggtatggtggacaagcgggggggggcacattacatagagaactccatgaatcaccaaactccgcattgtttctctgcagactaacatactgcttgatccctttgaaagccgtggcttctggaatcaggtgaacatgttttttcttggcttgaaacgcggtgttggtccatcgaacttcaaactggggaaccggtaccttgacaccatcagcgtttttttcgtgtttcatctcatatcttgttattatgccgacgaaaaaagccgcacctacctcgcgatagtttttgcgaagcatccagtcttcatcagccggcgagaaaacaacgttcgcccccacaattttgtcagcagacatttgagctcgcagtagcaactcctgtttgaaggctgcttcagccgtctttttagatgcctttttggttgtagcgacttttgatttcttggcagcagagcgcttggggggattcgatgcagactttcgcttcaatgctccacctcccgtatccgatgatacttttcgcgcactcttcgctgatcgctgcctcgctagcgcttccctttcacgttgatcaccttgggtacacaaacccgcgtttacgcaagccacatcatcactatccgactggataggtggaagcctctcgccagtgtgcgttgtcaacgttgccactataccatgacgaacctcttcgtgggatgtggaagacagtagtgatggtggcctcgacgtggagatcgtggtttcgtagcaggctttactacaataacattgatctccaaaatcctcaatgacctcaccgtcagcggtgcgaagcgcacgtgacgatgccacatcgtgagagcagaaatgatgcatgaatgcgttgcatgcatcacaacttcggtcagtcgaacacccagtgctgcaaacagcacaaatcgccacttcaacatttgtttcacgtgtttcaaactcgttgctactggtacccatcgcatcggagccttccacctgcctttttcctgcagggcaaccacttgaagccgtcgacccctcttccgcgtcagacgaattccaataccccattgctccaccacgactaggcccatgcatttcagaacttctgccgccatccataggttcatctatcgtgatgttaccagagtcgatctcgccaccagtcacagtcatattgtagtgttccaccagaaccacttcacccagaacgtaatcgccgccctcgaccccgtccggatttctaccaggacgaacatagcgatagcgattatccagattccctcggccacgtggcggtcgtgacgtccacccagcgcgacgaagagccttccaggcttcggcaaaggctgtgcgaccaccagacactgtacaacatattaggttttggttcatctaggtggtcaattcaaacattaccggaagtagcggcttgtgatcttggcgcaatagctcgccgagggttcagcggtacaggcggggagctcattgcgctagcgagagatccccttttgttgtcgatacagaattatattcttgggaagaccgaagggcaaagatcttggtaatggtcgcgatgcgcctccgacgaacaacgactgccgcacaaaatcaagatcctaatcgagagaggttaggagagcgctcatttcccaacccaccaggaagccggatggtcgatcgccggcgtgatgcaatcgatgtaagtgctagctagccactctctaagctgattcgatctaatacttggtcaccctgaacaatgcatgatagctcccaggtcccactcgaacaacagcatctaatggcagagcattgtatgggaaacctcgtgacgtaagtgccagtggcggatgatcattattccacccacgacctgacgcggttttctagccactagcatactttatttgtggggagcccgtgctgtttgacaggatttttcctgtgttcgttccagcgtctaaccgcgtacccatttgaattcaaatgacagcaaaagaaatttgggactgaccactaacctataacgaggaaggtgtttgagacgaagtacaactcaactgaggacgtcgacgagttgattgtggctcttccggtgaaagatatggacaagctacacaaagatatcagcatggccaaaagtgagagcgctcacaactatctgtggatgctgagatggctgcagacctgcttggagttgtcggaggtaagtaccaacaatattctaagcgttctgacgctactgttatgtgcttcctaaagatcaccgatcgatgattcaggatcggattcgttatttgcgggctcagatttccgatgctcgagaagctttggaccggcacatcgaaatccatattacgatggatcagaacaagacgtgcgatgccgacacgctgtggaagcatacacggcaaggcttcaagcgagagcagcagttcaacgcagcccaagatctactggaggccatggatgtggtcgacatcctggctcacgaccttatgatcggacacggaacgcaactttgccccggcaacgactgcaacatctattaccgtagtcaagaatggcgccgcgaacaaccattccactcaccgatggaactacctcgaacgcagtactactgccgatgccagagtttgcgtccaggctgctcaccgacttcgatggcctaagcttgcttgacctcgcacttccacgagtgctctagcgagacactcacccgtacgtagcccggaccctcactggatgaacgttagcaaactgctttgaaatacatatcctacttcttacattattttcgcatccgtttggttttcgggtccaacgaacaccagacaaccacatctccttgttggccattcataccacacgccggtcgggacacctagaagtaattgtagcgaaaacttaaattattcacacgtgttacgccacgggaaagaagggcagccctcaactcgtccattgcgctcccttccatgctcacccgatgaggccacgacctattgcattcctcacggaaccatctacgtgacattgctatcagaattctgaaagtgaatcttggtgttggtttgttcttttcttccaccctcgtcccagggatacagcctcattctcatcaactaacatcagtagcaatactacccaggctactatctggcgtgtcgtttgaccggcagatcaggagcagcactcatctggcgtgtcgtttgaccggcagatcgcgcggaccgccgcgtgttctaactaagcgttgctgaattacaagtgctttggtacccccagctgaaaagtggatgaaaagcaacccagcaatcaatgtgtacaaatccatttacgacaactattacaacctgccatgcgcggaatagtgggccagaatccgtgcttgagttgcttccaacatctactacgcagttgtctgtaagtattcgccagtacggacatggtgaagcagatggatgtacgccgatttgaaatagcgtcaatccaggagctcgccgacactgcgatttcgtactacccttgccagaccaaagctcatgctctaccagcgtccagtccgcgatcgagggcactgtccgtgtcgaatcgggtcaggagcacgtcgctgacatcatggcgctcgtgaacgaatcaaacctgacggccttgtcaccaggggttgactcacagcttgcctttgcacggtgatgtggcccgcttagcacgaccccggatgctgggttgggatggggacgcgtccaatcagcaccatcatcccttccttgtacgagcattgctatggcgacatcgcggcgcagtttcctcgtgagcatcacggtccaggacatcgaatcgataaagatccgtccggcgtatcgtcacgcagcacgggcttggcatagagattgtgcatattcagggccatgacgaaggccattcaaggccagcgtaccagggggcggggactcggtcaaatgtgttgattgttgagtggctaacgtgttgacgagagcctccacagcccataccgtcgaaaacagtgcgagtgcgacgtccgttgatgtaggtccagtgcgccgacgagggacacgctagtccagcgtgttggggccggggatgggaggaggagaaggcgggggataccttcgccgacgcgggagcagcaccaccgtggcatggcagcgtaacggatcccgccactcgacgggggacagcacgagtgtaccatgccggcttcggcaatccagcgaggcgctgaacatcgagcataccggggagcaggacgaccttggcaatccagcgaggcgctgaacatcgagcataccggggagcaggacgaccttggcaatccagcgaggcgctgaacatcgagcataccggggagcaggacggccttggcaatccagcgaggcgctgaacatcgagcataccggggagcaggacggccttcgtacgacggcgtttaaaagctcgttggcgatggtgtcactcctccaaaaggccaagaaatgcaagatcatcacgtcgtccaggaggcccatttgcaccattcatcggcgtgatgctcgacggccagacgtgcccagaaatggggtggcagcaactatgatcgaggttgtcgcggtgccaatggcaaggccgggcaagtgcaagtctggccaattggcaagattagtgcatggatatgtagaaagtgtcgattcggcgcacgacctggtgtggatgcgactgctgctcaaggatttgggtgcggagcaagttggacctacggtgatctacgaggacaaccaaggcgccatggcgttggcgaagaatgtcggctaccaagcttgcaccaagcacatcgacatccgctatcacttcatccgcgagaagatcacgagtggtgttgtggagctcgactacgttgagtccaagaaccaactcgctgatttcctgaccaaggaactctcgacgaagactcttcgctatctgctcgagcgcagtaacatcactgagatgctcgggtagactgcaaattgagtgggggtgttgcgattgtacgcttcgcagtctagttgtgtgtgtccgtatcgaggcacatgcttgctgtgaagtcgttgtcaaaggtacgcaattgtggtacacgtggtggaatactgggatctgattggcggagtccctagatttgaaacttctgattggctgagagaaaggcaagttgaagttgcctttctggatacgatctgcaacatttactttctgctctcccgcctctcctacgacgaagtaagaggtatgcgttggtacgattcatgtttaagcataggagactaggatatgatagttagtttggcctaactcattctaattcacttttggatttccttcctaaccaacactcgactaccaagcctcgcccgcataatctcaagtgagattatccctggagtacgttagaagcgacagtcccaacgcagtggagtctacgatgaatgctgggtacactgctcagtggacgctcaacatgtggaatatggttgggaaatctcaatttcccgcccatcactcgtgacgtggagtatgacgagctgaacttgaagtgcgactggttgtcgaacaccatatttgcagcgacctgttctgccgttgcggatttgggcttgataaggaaagtagacaggctcgacatttcaggagcacaatctaccactcaggatcaactggtgtgggtactgtatgcgctgacttgtggatcgtcaaatttctcgatggaagagctacacattggagatgtttgcttgacaaaagatctgagggtttcatgtgtgatggaacgggttctctgagtgacatgttgagtgcgtagttcttacggttggggccgcgggctaggagccgagcgcagagagctgagcgctaagaagccaggaaatgccatgaatcagcttcttccattgtgacggtgacaagcggaaaaccttttggctctgtgatgggatagaatagattttttggtaaaaaaaagaatcgtggtaatgcgttattactgtacttaagtacgcctcaaatgtatcttgcctataattaccatgtccagctcacaaccaaccgagggagcacatgtatcgtgggtgtgttaggaggattcctggaaacgcgaagcctggacaaagatacagtacagtcttccaagataagacattgtgcgttgggctgctgatggggatcattcgcggtctcagcttgttaattatgtattaaatgctggcgaggagaacggggtcgcttgagtgtcgaccgtggtgcgctgtcaaggttcagtttattacaaacaaattgaagtggtggtatctgctcgacaagtccctgccatcaacacgctagagttaccccataattcgggtagctcagaacctcactgcgaatgctcgataacttgttaaacttaaagtgagagcaagaaggaatacatttggtggttgggaaatggcgggaatgtattttgatgattagttcttgctttacaatattttccttgaccccataccgtttctacttggagccacaactctattaatccacacgatacccgtcaagcaaagtaggatcgacagaacacctgaataacgaaaagtgtattgcgcaacttttcgcaaggttgctgttaacatttctaaagatttttttcccatactatgtataaccctagccaaccgctgccttgaatcgagctgcacccggtgccttgggtcgaacagttgagacacatccatccgttggtagtcgacttgtttggtacgtcgggggtctaagcctagacaactcccgagatggagccggaattcggaaacgattttcccttgctggtcttgagaaagcacgtgccgtggcttgagtcattccacgtgaacgcagtgcagccattcgtgcgggcacagatggcgcagcacccgataggatcgatgctggcgcgcttaccaatattagcgccaaggaacataacgttcttctgcaagctcgaagagcatgtcgacacgctcgagacggccgcctgggagacggttgcgcccagcacgcccacgcagacaaacaggagcttggcgatctgcattgtgtcagtgcgagaaacttggagaatgaacacggcaaatgctagcatgcacgcgaagtcaagcacgctgtgacattcattgccaatgtgatgtatgttcgcagagagccagacgcgtgctacgctcctctgagaggagtcctctcgtcgcaattcgaactgggacttgcctcattatagtattggtatgtagcctcactattcgcagccgtgtatgtacagtaaggtacggtgccagtcgcgtgcaatctgccagttccgtgccactttagcttcaaccaattagaatgccgtaagtatttttaaagaaccctattggcaaaaagtctgtaagcgctaccagccaataaaacccgccaaactgtatacgaacaagacacatttcccgccagtttgagctcagtctcctatttcctgaagcctacaaaccacccaccaaccccgcagcgaccacctcgacaatgcccgcgtacgagatcgaagacctcaattctgcagtgaagcgcgtcctcgccggcgacagcgcccgcagtgtcagcgacagcaccccaattccgtatcggacccttacgaaatgggccgcgaaggggaaaatgggcatcttccgcgcacctgttcgtcatggcccggctccgctgctctcgcaaccagcggaggcatgcttggtcgagtggattgtcgggcgccaactggtcggtcaccccgcaagtcgcaaggaggtcatcttcaaagccggcaccatgacctccatggctactggtcaaacggttggtggcgggtggtaccgccgcttcatggggcgacacccgatgctggcaactcgaacgtctcaggcggtatgcaaggcccgcaacgctgtgaccaagagcgatctcgggcagttttttagttcactgatcaaggctgtggtcgagagtcgtttggacgcgtctcgcgtgttcaacatggacgaaacagcgtttcagaccaacaagggctccaagaatgtcgtggcggttcgaggctccaagaacgtttggcaccaagacgttgcgctcaattttcacctcacgctggtcgcgtgtggcagcgcgtcggggtgcatggtgccaccgcttttcgtgctgccggggttgacagtcaagctcaaagttctagatggctgcgccatacccggggctgccgtcaccacctcgagctccgcgttcatgaatggatttctctttcttgagtggctgcgctttttttcggctagcgtgcccaaggacgtgcagcgacctcttctcctgattctggatgggtgttcgtctcattactccgtggagatcatcttagaggcagctcggcttggcgtgcttctgttgttgctgccttcgaacgcgacccacctgcttcaaccactggatgtcgctgtgttttcgtcgttcaaggcgaagctacgccgcctaaccgagatctacgttggcgagactggacgcaattcggtcgacaaagaggaagccatccggatggcaagcgcagcatgggtaggatgcaagatgggtgagaacgtcaaagcggggtttgctgcgtgcggccttttccctccgtccaagcctcgtatggacatgtgcatcgacaatttccggcgcaacgggacccccgcatctacgaagctggcagcgtggctccggatcaaggaggtcgtgcagaaggaggtgctcgtgctaccgccgtccaagaagcaggtgcgcaagacagcaacggtcgccggtcgtcttttgacctaggaaacactggaagcgatggcacaaccgatgaagaagcccaagaaggcagccaagacgaagaagcatccgatggcaacgaaggcgacgaagatgaagagggtgccgtctccggtgccggagcctgtgcagctgcagttccagtctgcgtcgaagcacggtgaggcaaaccagcaggataaagttgtgtgggaggcgatagtttagtataaccaaagaaaaaagcttttgctgaggcattttccaccacattgtcttcattgtttttgttgtttatttcctactttctatagtgatacgatatccctctgtatgcctgggcccgctgtgatgtccggtttttgagatttgacgatctcaaaccgttatcagaaggggaacccgactcatggtacttagcatactggcggtcaatccgttcactcggtggcagccgtcggtcgctttcgcagttctgtggcagccccccaatgctctaattgacagttagcccactagtgttttggttgagttaatgctgccaggtggaatcgaaccaccgtcctctcggttatggtccgaggactttacgactaagctatggcagcgctgccactgagcacaaatcatactatatttatacacaaatcacataatattgtgtaccatattgtgatatcgtatatcctgtcttatacgatttcaaatgggtgcaaatcattttgtacaggttgtttcggtgctgtcatgagagcaaaaagagatttgtcccccttacaaaacaacagataaaatgcggcagataactggtcctgccgtgaatgggtttgcaaatagtcagcaactcctaattgagctctcatttactgtagagctcagtaaaacagtctgctaacagaagagattgcgctctcttcagatatgcgtttacatctcaaaactaattgcccaataaaaagttatgagtgaaacagtgagcgggattacattaagacacacaagtgggaccgtaccttagatgtattgtggttttcacccgttttggcatatcgggtggttcaagatccgatatatcgggcccgattagctaagggaagcaaagtatatctggcgcgatttgactctggggcccagagtcaaatcgggccagatatattttgcccccagactgggggctccgagttgtgaagcaggggacagtaatgccgcttttcggcggcaaaagggaccaccgccaaaacatgtctgggaccctttcatatcggtgtggcacgaagttgtagccccgtggatgatcacacaggtgctttagctggccatagtgccatgtagtgggatatataaagtgtactgttgtccccaatgtcttcttcttcttctaatgcgtcgtgagaggtgggtaggatatggtcaacatggtatgccttccctctgagcattatgctcctaactcagttcagatcagatatagctaaattgaggaacccttttcatataattcggagtccgagataacacgtcaaatcgggcggcaaaaaggttgaaaaccacaataccggtatgcatacatctgcacgtaagaagccagacttaggtctcatcacatgatgacagccataatcttgttgagtcagcgttgaacagttcgcttacttattctgaagaagtaggctgttaccaatgaggttttcgtagctcacgacctcatcaaactaaataaggcagtcttgaaaaactttaattaggcattgcatagagattgtatgggataggatgggaaaacggatgaggcacgcatttatacagactaatgtaaaggatgagggcgactacagcgtctaaagcagcctgtccaataatttcttgcaggcagtgtccctcagtgcagtgcggcattgctgcgcttgaagcccgccttccatcgcgtagttgctaaagcgaccatagcggggcacctttgcgcttcaagctgttagaccctcccatctgacgaaatactaatcctactgcgaacgcgatgagaagctagaatctaacgctgtcactagatttctctatgcgtcttcgaacgtcaagtcccgactggccgtcagggaatgtcattattgcggttgctgatgagcagcctaccctagactctacaactgtaggtctggagaacgtagacctagctctcgctcgtgtcgaggaaaatgttctctgtggttgacttcggcctgtccagagctgtaggcaacactacgcaatgctctgctacccaagtcgcggtgggcgcgaaagtaatctgacttggtttttagtggcattcgccacggcctttagtcttactgaaatctctcatttgggtttcatcgggatgcagcatcagtggtgggtttaaggtgcgttgttgctttcacggaagttgtctgtactactttcttaattaacgaaaattactagaggtaagaagttttgctcttttattaacaaatagcgtatcagagttcatacgtgaaacgtgaaacgtacaaatgtatagcgtttgtcgatgtgaagccgattggggagggggtggctagtgcttgtattccacagttagaccccaactaccttctctactgatgtttagcaaactgcaatggctgccagcttcgctatgagcactgctgctgcagcaagtatccacacattcttgggttcagcctgaattttttgctttcaatgaggcgctctcagaaacctttaacgaggtagtttggcattttatgcaataatgcctcattggtagcagccaataagttattcagaacaaaccgccaaactgacagtaagaaatcagtttcagtaagtaagttacactagtgcttacagacaacgacttactgtacaaagccggcatgcttaatgccatcctcctatataaaaacaacgataaattccctcccgtcaaatctgtaaaactatcataaaacacacataaaacacacggtgtgttgcataaagaacacaagaaagcatataaagtacacaaaaccagatggttttcaaagatgaagtcatttgatagaatctgattggatggtttgcagctttgcttgacttcgtctgccggctttttgtgtctgccggctttgtaagtcgttgtctgtactgtagtgtactaagtacatgtgctctctctgattactccgtcaagagtaaacatcctcatgccctgtactaagtagtacttagtacagggcatgaggatgttaacttagtaagtacatgtgctctgattaatctatcaagagtaaacatgctaatggccttcaagttaacaaatccaaatctgcaaatctcagtagtatttactgacttatgcaggaaattcctcctgtagtcgccctcatcctttacattagtctatataaatgcgtgcctcatccgttttcccatcctatcccatacaatctctatgcaatgcctaattaaagtttttcaagactgccttatttagtttgatgaggtcgtgagctacgaaaacctcattggtaacagcctacttcttcagaataagtaagcgaactgttcaacgctgactcaacaagattatggctgtcatcatgtgatgagacctaagtctggcttcttacgtgcagatgtatgcataccggtattgtggttttcaacctttttgccgcccgatttgacgtgttatctcggactccgaattatatgaaaagggttcctcaatttagctatatctgatctgaactgagttaggagcataatgctcagagggaaggcataccatgttgaccatatcctacccacctctcacgacgcattagaagaagaagaagacattggggacaacagtacactttatatatcccactacatggcactatggccagctaaagcacctgtgtgatcatccacggggctacaacttcgtgccacaccgatatgaaagggtcccagacatgttttggcggtggtcccttttgccgccgaaaagcggcattactgtcccctgcttcacaactcggagcccccagtctgggggcaaaatatatctggcccgatttgactctgggccccagagtcaaatcgcgccagatatactttgcttcccttagctaatcgggcccgatatatcggatcttgaaccacccgatatgccaaaacgggtgaaaaccacaatacatctaaggtacggtcccacttgtgtgtcttaatgtaatcccgctcactgtttcactcataactttttattgggcaattagttttgagatgtaaacgcatatctgaagagagcgcaatctcttctgttagcagactgttttactgagctctacagtaaatgagagctcaattaggagttgctgactatttgcaaacccattcacggcaggaccagttatctgccgcattttatctgttgttttgtaagggggacaaatctctttttgctctcatgacagcaccgaaacaacctgtacaaaatgatttgcacccatttgaaatcgtataagacaggatatacgatatcacaatatggtacacaatattatgtgatttgtgtataaatatagtatgatttgtgctcagtggcagcgctgccatagcttagtcgtaaagtcctcggaccataaccgagaggacggtggttcgattccacctggcagcattaactcaaccaaaacactagtgggctaactgtcaattagagcattggggggctgccacagaactgcgaaagcgaccgacggctgccaccgagtgaacggattgaccgccagtatgctaagtaccatgagtcgggttccccttctgataacggtttgagatcgtcaaatctcaaaaaccggacatcacagcgggcccaggcatacagagggatatcgtatcactatagaaagtaggaaataaacaacaaaaacaatgaagacaatgtggtggaaaatgcctcagcaaaagcttttttctttggttatactaaactatcgcctcccacacaactttatcctgctggtttgcctcaccgtgcttcgacgcagactggaactgcagctgcacaggctccggcaccggagacggcaccctcttcatcttcgtcgccttcgttgccatcggatgcttcttcgtcttggctgccttcttgggcttcttcatcggttgtgccatcgcttccagtgtttcctaggtcaaaagacgaccggcgaccgttgctgtcttgcgcacctgcttcttggacggcggtagcacgagcacctccttctgcacgacctccttgatccggagccacgctgccagcttcgtagatgcgggggtcccgttgcgccggaaattgtcgatgcacatgtccatacgaggcttggacggagggaaaaggccgcacgcagcaaaccccgctttgacgttctcacccatcttgcatcctacccatgctgcgcttgccatccggatggcttcctctttgtcgaccgaattgcgtccagtctcgccaacgtagatctcggttaggcggcgtagcttcgccttgaacgacgaaaacacagcgacatccagtggttgaagcaggtgggtcgcgttcgaaggcagcaacaacagaagcacgccaagccgagctgcctctaagatgatctccacggagtaatgagacgaacacccatccagaatcaggagaagaggtcgctgcacgtccttgggcacgctagccgaaaaaaagcgcagccactcaagaaagagaaatccattcatgaacgcggagctcgaggtggtgacggcagccccgggtatggcgcagccatctagaactttgagcttgactgtcaaccccggcagcacgaaaagcggtggcaccatgcaccccgacgcgctgccacacgcgaccagcgtgaggtgaaaattgagcgcaacgtcttggtgccaaacgttcttggagcctcgaaccgccacgacattcttggagcccttgttggtctgaaacgctgtttcgtccatgttgaacacgcgagacgcgtccaaacgactctcgaccacagccttgatcagtgaactaaaaaactgcccgagatcgctcttggtcacagcgttgcgggccttgcataccgcctgagacgttcgagttgccagcatcgggtgtcgccccatgaagcggcggtaccacccgccaccaaccgtttgaccagtagccatggaggtcatggtgccggctttgaagatgacctccttgcgacttgcggggtgaccgaccagttggcgcccgacaatccactcgaccaagcatgcctccgctggttgcgagagcagcggagccgggccatgacgaacaggtgcgcggaagatgcccattttccccttcgcggcccatttcgtaagggtccgatacggaattggggtgctgtcgctgacactgcgggcgctgtcgccggcgaggacgcgcttcactgcagaattgaggtcttcgatctcgtacgcgggcattgtcgaggtggtcgctgcggggttggtgggtggtttgtaggcttcaggaaataggagactgagctcaaactggcgggaaatgtgtcttgttcgtatacagtttggcgggttttattggctggtagcgcttacagactttttgccaatagggttctttaaaaatacttacggcattctaattggttgaagctaaagtggcacggaactggcagattgcacgcgactggcaccgtaccttactgtacatacacggctgcgaatagtgaggctacataccaatactataatgaggcaagtcccagttcgaattgcgacgagaggactcctctcagaggagcgtagcacgcgtctggctctctgcgaacatacatcacattggcaatgaatgtcacagcgtgcttgacttcgcgtgcatgctagcatttgccgtgttcattctccaagtttctcgcactgacacaatgcagatcgccaagctcctgtttgtctgcgtgggcgtgctgggcgcaaccgtctcccaggcggccgtctcgagcgtgtcgacatgctcttcgagcttgcagaagaacgttatgttccttggcgctaatattggtaagcgcgccagcatcgatcctatcgggtgctgcgccatctgtgcccgcacgaatggctgcactgcgttcacgtggaatgactcaagccacggcacgtgctttctcaagaccagcaagggaaaatcgtttccgaattccggctccatctcgggagttgtctaggcttagacccccgacgtaccaaacaagtcgactaccaacggatggatgtgtctcaactgttcgacccaaggcaccgggtgcagctcgattcaaggcagcggttggctagggttatacatagtatgggaaaaaaatctttagaaatgttaacagcaaccttgcgaaaagttgcgcaatacacttttcgttattcaggtgttctgtcgatcctactttgcttgacgggtatcgtgtggattaatagagttgtggctccaagtagaaacggtatggggtcaaggaaaatattgtaaagcaagaactaatcatcaaaatacattcccgccatttcccaaccaccaaatgtattccttcttgctctcactttaagtttaacaagttatcgagcattcgcagtgaggttctgagctacccgaattatggggtaactctagcgtgttgatggcagggacttgtcgagcagataccaccacttcaatttgtttgtaataaactgaaccttgacagcgcaccacggtcgacactcaagcgaccccgttctcctcgccagcatttaatacataattaacaagctgagaccgcgaatgatccccatcagcagcccaacgcacaatgtcttatcttggaagactgtactgtatctttgtccaggcttcgcgtttccaggaatcctcctaacacacccacgatacatgtgctccctcggttggttgtgagctggacatggtaattataggcaagatacatttgaggcgtacttaagtacagtaataacgcattaccacgattcttttttttaccaaaaaatctattctatcccatcacagagccaaaaggttttccgcttgtcaccgtcacaatggaagaagctgattcatggcatttcctggcttcttagcgctcagctctctgcgctcggctcctagcccgcggccccaaccgtaagaactacgcactcaacatgtcactcagagaacccgttccatcacacatgaaaccctcagatcttttgtcaagcaaacatctccaatgtgtagctcttccatcgagaaatttgacgatccacaagtcagcgcatacagtacccacaccagttgatcctgagtggtagattgtgctcctgaaatgtcgagcctgtctactttccttatcaagcccaaatccgccacggcagaacaggtcgctgcgattattgtgttcgacaaccagtcgcacttcaagttcagctcgtcatactccacgtcacgagtgatgggcgggaaattgagatttcctaacgtttttccacaagttgagcgcccacagagcagtgtactcagtaaatacccagcgttcatcgtagagtccactctgtcaggatcgtcactcctaccatactcaagcgacaaacactgtgtagcagctcgtaccagcgctgtcgtcaacgcggggatccctggttgtgagaagtccagatgatcaataaggattattgagctcgatgctgactgggcatttgtcgacctacggcagctttgtggcgctggtgtagacgccacgggagcataagtcgccagacgtgttttgtgcaaacgtttcatgacattctcagcatttccagtcgcgaacaactgaactacgggaggtacgtcggcgtcaagaagcttcttcagctgagttgagagcggcttcggtgcatctccaggtgggtcagcttcgcattgaccttcagcattgacagttgagttcttgatgtcccattcgagagtgaattcgctgaagtcgtacagcttcagagcctcgttcagtcccattgcttccaacttgtccatggcttcccgaaactccgttgagttcatcgaggggtcgtctggaaacccaagtagagcgccaaagcttacgtggtactgcgttgcagcggggtctcgagacggtaaagtaccgaagaagcaaaatatccattgcgggtgatagctgaacaccatatctggcattgacagcgggtatgtgaaagtgtcgacccatcagatccgtgtacgccttgttatcgactacacccacagccgatatcagctcaatcgcttcgcgaagatgctgcacacgctttcgatcttgtcgattgagttcatccacggaaagtcggaggtaaaacagggttggattgacagctcgcggggctaacgtttgggtagaggggctggacggatatctgcagctccgatccaggacatccaggctcgagctctccgtacagtagcatgctagcccgtaaagtagacagccatggatggaggaacgcccacttcgagtccatcgctgagaagaaaacgggaatgagtggtggagtgagggaaacatgaaatgtcagttcaatagctgtcaatcaaagtagttagtactatccgattggtggtatatacgatttatttttattattacatatatacaatatacaatgtattttgattctttacgtgttcgtaaaaaaagaaatatgagcacgtacttattaatatttggcactgcaattttttctcgtgttgttaatactacagtacgaagtattaacgaggggcttgcgggcctaacacgaaactgttctgatcgcactgctctcttctgtctctgccaagcacacaattcatttgtgacagcgaaccgatcgtcggacaggtgtcgagacgaaagcaaaaattcggctgaggcacaatacgtcgagaaggttcacggccttgcgttgtcttctgcttttcacgacactgatcagtgcagctttcgactcgctgggaagtctgttcttcgtcagagccaaataatcaccgtcgtgactgttgagcgccagcatttcgttgatgtcatactcccattggtaagaagcagacactgtgagtatcgctaacccgcgagccatttgatatgaagggttatccaaacacggccccagatccgggacaatcgtagaaccgtaaatctcaatcttccggatacgccaagtccgcaatgcatgactccgagagcccactaccacgttaaatccaatgatgttgagctcttctagatctggacaaacctccgagaggatactcagatccagcacaggctgagtcgttgggtccctctcggtcttcctcttgcgaacgaaaaggctctttaccctccagcagattaaacctaggaggtccgttaccaacgcgcctacttcgacactttcaaagctaaatgtaagggaacggatgctattccacaatgctctcgacagtaccgagtttccttggccatctcggacaaattcgctgacttcatctctcaagataactttgcaaactccgtatccagggacaacagcatcaaccaattcaggtgaactgaaagggtcgtaccgtgctcggcaacgatacgggcttgacacctcgagcacggtttcttcaccattaggcaaaacgagttgaatctgagctccttgcttcaattcgacaaatccgtacttcggtaggttcactgacccctgatcttgaattactccagggaacttattctgcaacgttgctttggcagcagtcaaagctggcttcgtcaaggaaacaccctcgcattggagcgtaccaatcgacacacttaaagacccacaacacagcgcatatagcacccacgacaaccgattctgagtaggagattgcgttcgtgaaaaccccagccagtccaccttcctaatcgagctcaactccgctacggcagaacacgtcgcagcaaagacgccgtctggcgcccagtcgcaattcagatccaagaggccatactccacattacgagcgatagacggaaagctgagatctcctagtgttactccacagattgagcggccactgaccaacgtactcagtaaatacccagcactcatcaccgactgtgcagtatcgaccatgtcgtatttacgatatcccagcgagaaatactgaattgcggttcgtgctaacgccgttgtcagctctggtatccctgattctgagaaatccagattaaacgcataaattgttgggtgcaatacaggttggtcaccattcgatccatcgcataattgcgcggctggagtggctgacaagggatactttaacaccacacgagtttcttgcaaacgtttcaccacactcgcagcatttccggtcgcgtgcagctgaactactgggggtacatcactatcaaatagtttctttagatgagttgacaaaggcctcggtacatcgcaaagagcaggacaataccgccctccaatgttaccagtcgagttctcagtaagccaatcgatagtgaattcactgaagttgtagagcttcacagcttctttcagacccattgcttccaagttatccatggcttttttgaactccgccgagtcaacccatggatcttttggaaatccaagcagagtgccaaagctaacgtggtactgcgttgcagcagggtcttgaggcgataaagtgccgaaaatgcagaatatccacttcgggtgatgggtacaggcctcgtcaggttcgacggacatgagctgctggaacgctgcattgtcgacaatagccactgccgagaccaactcaatcgcttcgcggagatgctgtaagtgctttcggtcgtgtcgatggacttcatccactgaaatcttgacgtaaattacattttcctccacattttttgcttttggatagaggggcgagaggataatctgctggtccgataatacccgctccagttcaggctcgccgcaccctagtacactaccccacagggtagacagccaaggatcgagaaacgtccagtcggattccattgtcggcaaaccgaaagtgagggagggaaatgccctatatctgaagaaagtgtcacttcacgagaatgacagcttcttaccccggatgattgaaagcaggcgaacacttcatgcctttggagagaacgcatcgctcggtgggggtggaagaatcaattgaagcgcatgtggattgtatagcttcaattcatatgtagactgggcgacagaagtattcagtggcatcctggccaactgtgttcacttcctgtccaattggtaaggcttttcggccctcctattgtctgcgcttgccggtgcagatcggaagttgccacatttcgcaaatggtcaatgtgagaacgacaatgcgagattcgatcgatccgaccaccgccgagttgacagttgcgttggctcggactcccaaaaaatatatttcacagaatcccaacgaagtggctggatacttgttggcaaaattcatttgccgtaatgtttgtcttctgaccggcgaaacatttcgattccagttgtggaatatcggaccccttgtgacatctgccacagcttcacgtagtgcattagcgccgtccgacatttcatcgtactcgccgttctccagactaacttctgtcaatgttgcaatcaaatgaaaattcccccgctctatggtttgtattcattcgagaaggaggcaagctgcacccagcctgactagatggcgacaatgatggttttattccatctatctcacgtcgatgacgagccctgtatgacccagccgataggttttcgtgttcgtcccaggataccatggctggaatgagtttagaaaaaggaacttgataaaccggtttatcaacttcgtcggcgcggggtttcaaagtttgaaggcggtatatcggtatttgctgttcaaaccaatactcttgcaaaaacaggaagtgtaacggatcgccagcttcgcttcctggagctcctatttgctcctcgcgcagatataattggcttcggataaagccgcaccctttcagtagggtcgtggaggaaaagcaaaggcacgtacatgtagcttcctcactcttggcaccttttcccggcagcgtatccaagccgcactatcgttccaacgcaagaaaggcaaatggtgacagctgcatacgccacctgcagcttctaggacgccgtggcgcgtagcaacctcaccatcttggctggagacgtcacatttcaattgtccctgtttcgagcacccctatcgtctaccacttctcgtcttcaacacttctcccggcccccaagctccacaacttcgttgtccctgaatcacatcaactctttgagagttcgccttcgctcctcgtgcttttatcggtaagtgctaaatgaatgcccgaatcagcttttcgctatctagcattgctctctctctactaatatatgtagcgggccgcgccacaacgcgtgactacggcaaacgggcggtcaaataacccacttcactgtcgtcgccagaagcggtcgggttgcaagtgacgatggaccaactctcttccagtcgtgatttcaatgctgaaggaccagcctccactcgaggtgctcgaggtgttgatacagcaccatcgtctcctgtcgagtatgattctgaagattactgcgatgacactactgaagtgacggctacacgaggctacgcaaatggccagcagtcccaagaggaatctgctgttgctggagcaagaggagggcctccccaaaacgtcactcacggctcagcatttgcgcgacttccgttatcagaacaagcaaggacgtcagcatcccaacagatacccttcacgcaatcggcacccccaataacttcgagtctaccctgtggtgatttccgtcggacgacttcgaactccgtaggacccggtgctggagctacgacaccaacgccacaccagccacccgacgttactggccgtgactcctgtgagtggcctcccgagccgacggcgctgtatgatgcagacgatattgctcggatcccagcatgtatccgtgaggcggtactccagtttaggccaacccaaacgtgtacgccgatgcctctgccccgaagccatcggtctattacgttccaatatggagtccgcgtgaagtgctggttccgcgaatcccttgttgtcgggtggttgtgcatggcaagcgatgcgtgccgtcgggatatcacgttcctgcccttccatggaggaaaaaccactaatgctacaaagcacttgtgggagacgcaccaaatccagtctgaaaagacggccctacagaatacgcgcaagcgggaccgcgctgaagaggtcaactgcattctagcgtccgcgttatgccgtgacgatgcgaagcgtttgtgtttgttgctggagacgattcgaattgtttacaacaacttgccattccggtttggtgagtacgaagagtcagtcattctgaaggaagtcgtcacaaaagatgagttcaagacaacagtgaactcaagaacggtgacacattcacttgtcgagttgtacgcatccggtcgccaagagctgatagggttcatcagagacaatcgtttgggacttatcaagtgtttgacgatggatgttgacttctggaccccaaagcatggtggcgaaaagtatctcggtttgcgcatctacttcgtcgactcccacttccgactgcgtactgtgcttctcggtactcgtcatttcttgccaatgtacggagaacgcgaccaaggattcgcggcccttttgagcggtggatttgtggtattctgtttgactttggcctgtccccgagcgacttcttcggctccaccactgacagcagccccgacgttaaatggattgaagtgggaatggtgcatccctcacatggtgaacgctgccaccaagatggcctgcggcttggcgcgaaaatcgcacaatcccgagatgtcggagttgctaaacaagctatctcaaacggtgtacggcacctccaccaactcgacacttggcgacctgcttcccatgctgatgataatgttgggggaaggcaatggtacccaactagtaggctacaagccgcatcgcttcatggggatggcagccacgatggagcgggtactggagaagtggccagctctggaggcatggtacgaggcgcgttcagctcagcatgcacggaaaaagaagcgagcgccaccagggtttcaccttgccggttgtcaacagcatttggtgcagctattatcaatccttacaccgattcttctcgtgacgaagcgatcacaggcgcaggatacgaatcaagtgcaagtcttgctgtccttgtatacgatgcgcatgacttctctcgcacttgacagccccatcaggctctacgacacggctccgacgaacgccgtcaatattcacccctttcaactaacatcgctggtggcgaggacagggatgctgctacagaaggcgttttaccacaacttcttccgccgatatgtagatgcagactacattgcatccggttcctacatttttgagatgcaactggtgatgcatccttcggttaagcacgtggggagtccgatggacgaagtgattgccgccgttgcacgtactgaagggagaatgcgggatgatcttgtcgctggtcatgttgtcgccgttcaagctgcaattttgaagcgcttgaagtcgctaatgcgcttagtagccaacagtcaagacccagcacccgttgatccgattgctgctccagctgtgcaggccaatgttttctaagacgacattttggcaacctttgcagttcaacccttccgaagcaccgaacgacctgctcaacaacgtaacgagcacgatgctcccatcgccggtgagctgaaaaggtggttagaagattcggatgggctgcagatgataacagttcctgatccagctaagacgagcgtccgcagaccggagagtatcctggaattttggcatcggcagcagcagtccaagcgctacgtcttgctacccgtggttgctcgcatcctgtttgcagtcccatcttcgtctgctcagattgaaagggacttcggccacagtgggcaaatggtgactgccctgcgagcttctacaagcacggctaatatcgacatggcttgcttccttcatcaacaccggtcatttgtcgatgtgtgccagtgcccaaagctgaaagcatccgaagtcgacgaacacattccaagcaatgtcaagattaacctggatcccgaggtagtggagcgaatggaatggaatcagctggcacaagcgtgcttttcgacatcaagcgctagcgcatttgcttcttacaacgaggaggagacgaaagactcaagctgttagttttaacgagtaggaggcgaaagactccagctggtagtttaactgcttcatatattcaaatatattcacccactccggagcaacgacccacccactccggattgcggccatgataacactaatcattgcagcctttgagccggttgggagtttttcttgctcatgggcaagaaccagcggtcgaatacattgatctccctcattttctcatcatctataatacgtcgatggaattgtcactgcaagtttgacgagttcttgagccattcgtagtgtggtgtctctcaaacatccgatcaagtcggacaacgttcctgaatatattcgaggtgatcgccttgatgggccaacggcgtaaagactcgtcgtgggcagacatcaccacgccatattttgtaatgggcaaatgctgaagagcggggcatgcgtagccagcgcggacagatcaatatgaattccggcttcggcatcgttgagttcgctaataccgttttaaggaacaaaaattactttggccaacttcagcagcttcatcagcgcggtggaaagactcgatcacgacatggttgagtgtcggtgacccgggcaatggtttctccgggaagactggctggtcacaatcggggataatttgagtctgtcgccaagttttgctgtggaagttccgtatcctgcatggctggtatgaagactcgaaaacctatcggctgggtcgtacagggtgtcgtgtacctcctccgtcaggggttggcacgctgagactgttcggagagaaggaggctcgcaaggggtcgaaggtgatagagcagacgagctttagagagggttaacaagtaagcttaactaaactatacaaaagctctcttgttgttgttgtgtctttaagacagggaagattcatgactgattctacatatcgagggtcggcacagccgccctcgttcctacgggtgacacctctccttttgtgcctcggaggtcgctctgcatgtcctccatcctcgagtgacaacccatccgcgttcacgttcaataccatagttccacttgcacgacacccgtcctaggcgggaatagagatccccttggacctcagtcagtcccactcggacgggaactgtgccttcacgaagccagcagcaactccaagtaccctaagacgggtacccggtgtaggatgtagccacgtctccactgagaccttcacacgagctcggcgcacggacccctggcacgggcccagtatgcccggtcacgggacaagggctcgtcatcgtcgtgaggtagatagaataaaaccatcattgtcgccatctagtcaggctgggtgcagcttgcctccttctcgaatgaatacaaaccatagagcgggggaattttcatttgattgcaacattgacagaagttagtctggagaacggcgagtacgatgaaatgtcggacggcgctaatgcactacgtgaagctgtggcagatgtcacaaggggtccgatattccacaactggaatcgaaatgtttcgccggtcagaagacaaacattacggcaaatgaattttgccaacaagtatccagccacttcgttgggattctgtgaaatatattttttgggagtccgagccaacgcaactgtcaactcggcggtggtcggatcgatcgaatctcgcattgtcgttctcacattgaccatttgcgaaatgtggcaacttccgatctgcaccggcaagcgcagacaataggagggccgaaaagccttaccaattggacaggaagtgaacacagttggccaggatgccactgaatacttctgtcgcccagtctacatatgaattgaagctatacaatccacatgcgcttcaattgattcttccacccccaccgagcgatgcgttctctccaaaggcatgaagtgttcgcctgctttcaatcatccggggtaagaagctgtcattctcgtgaagtgacactttcttcagatatagggcatttccctccctcactttcggtttgccgacaatggaatccgactggacgtttctcgatccttggctgtctaccctgtggggtagtgtactagggtgcggcgagcctgaactggagcgggtattatcggaccagcagattatcctctcgcccctctatccaaaagcaaaaaatgtggaggaaaatgtaatttacgtcaagatttcagtggatgaagtccatcgacacgaccgaaagcacttacagcatctccgcgaagcgattgagttggtctcggcagtggctattgtcgacaatgcagcgttccagcagctcatgtccgtcgaacctgacgaggcctgtacccatcacccgaagtggatattctgcattttcggcactttatcgcctcaagaccctgctgcaacgcagtaccacgttagctttggcactctgcttggatttccaaaagatccatgggttgactcggcggagttcaaaaaagccatggataacttggaagcaatgggtctgaaagaagctgtgaagctctacaacttcagtgaattcactatcgattggcttactgagaactcgactggtaacattggagggcggtattgtcctgctctttgcgatgtaccgaggcctttgtcaactcatctaaagaaactatttgatagtgatgtacccccagtagttcagctgcacgcgaccggaaatgctgcgagtgtggtgaaacgtttgcaagaaactcgtgtggtgttaaagtatcccttgtcagccactccagccgcgcaattatgcgatggatcgaatggtgaccaacctgtattgcacccaacaatttatgcgtttaatctggatttctcagaatcagggataccagagctgacaacggcgttagcacgaaccgcaattcagtatttctcgctgggatatcgtaaatacgacatggtcgatactgcacagtcggtgatgagtgctgggtatttactgagtacgttggtcagtggccgctcaatctgtggagtaacactaggagatctcagctttccgtctatcgctcgtaatgtggagtatggcctcttggatctgaattgcgactgggcgccagacggcgtctttgctgcgacgtgttctgccgtagcggagttgagctcgattaggaaggtggactggctggggttttcacgaacgcaatctcctactcagaatcggttgtcgtgggtgctatatgcgctgtgttgtgggtctttaagtgtgtcgattggtacgctccaatgcgagggtgtttccttgacgaagccagctttgactgctgccaaagcaacgttgcagaataagttccctggagtaattcaagatcaggggtcagtgaacctaccgaagtacggatttgtcgaattgaagcaaggagctcagattcaactcgttttgcctaatggtgaagaaaccgtgctcgaggtgtcaagcccgtatcgttgccgagcacggtacgaccctttcagttcacctgaattggttgatgctgttgtccctggatacggagtttgcaaagttatcttgagagatgaagtcagcgaatttgtccgagatggccaaggaaactcggtactgtcgagagcattgtggaatagcatccgttcccttacatttagctttgaaagtgtcgaagtaggcgcgttggtaacggacctcctaggtttaatctgctggagggtaatgagccttttcgttcgcaagaggaagaccgagagggacccaacgactcagcctgtgctggatctgagtatcctctcggaggtttgtccagatctagaagagctcaacatcattggatttaacgtggtagtgggctctcggagtcatgcattgcggacttggcgtatccggaagattgagatttacggttctacgattgtcccggatctggggccgtgtttggataacccttcatatcaaatggctcgcgggttagcgatactcacagtgtctgcttcttaccaatgggagtatgacatcaacgaaatgctggcgctcaacagtcacgacggtgattatttggctctgacgaagaacagacttcccagcgagtcgaaagctgcactgatcagtgtcgtgaaaagcagaagacaacgcaaggccgtgaaccttctcgacgtattgtgcctcagccgaatttttgctttcgtctcgacacctgtccgacgatcggttcgctgtcacaaatgaattgtgtgcttggcagagacagaagagagcagtgcgatcagaacagtttcgtgttaggcccgcaagcccctcgttaatacttcgtactgtagtattaacaacacgagaaaaaattgcagtgccaaatattaataagtacgtgctcatatttctttttttacgaacacgtaaagaatcaaaatacattgtatattgtatatatgtaataataaaaataaatcgtatataccaccaatcggatagtactaactactttgattgacagctattgaactgacatttcatgtttccctcactccaccactcattcccgttttcttctcagcgatggactcgaagtgggcgttcctccatccatggctgtctactttacgggctagcatgctactgtacggagagctcgagcctggatgtcctggatcggagctgcagatatccgtccagcccctctacccaaacgttagccccgcgagctgtcaatccaaccctgttttacctccgactttccgtggatgaactcaatcgacaagatcgaaagcgtgtgcagcatcttcgcgaagcgattgagctgatatcggctgtgggtgtagtcgataacaaggcgtacacggatctgatgggtcgacactttcacatacccgctgtcaatgccagatatggtgttcagctatcacccgcaatggatattttgcttcttcggtactttaccgtctcgagaccccgctgcaacgcagtaccacgtaagctttggcgctctacttgggtttccagacgacccctcgatgaactcaacggagtttcgggaagccatggacaagttggaagcaatgggactgaacgaggctctgaagctgtacgacttcagcgaattcactctcgaatgggacatcaagaactcaactgtcaatgctgaaggtcaatgcgaagctgacccacctggagatgcaccgaagccgctctcaactcagctgaagaagcttcttgacgccgacgtacctcccgtagttcagttgttcgcgactggaaatgctgagaatgtcatgaaacgtttgcacaaaacacgtctggcgacttatgctcccgtggcgtctacaccagcgccacaaagctgccgtaggtcgacaaatgcccagtcagcatcgagctcaataatccttattgatcatctggacttctcacaaccagggatccccgcgttgacgacagcgctggtacgagctgctacacagtgtttgtcgcttgagtatggtaggagtgacgatcctgacagagtggactctacgatgaacgctgggtatttagtgagtacactgctctgtgggcgctcaacttgtggaaaaacgttaggaaatctcaatttcccgcccatcactcgtgacgtggagtatgacgagctgaacttgaagtgcgactggttgtcgaacacaataatcgcagcgacctgttctgccgtggcggatttgggcttgataaggaaagtagacaggctcgacatttcaggagcacaatctaccactcaggatcaactggtgtgggtactgtatgcgctgacttgtggatcgtcaaatttctcgatggaagagctacacattggagatgtttgtttgacaaaagcggctttgggcgctgccaaatcgacgctgaagaacaaattccctgaaataagttcaagacacaagtctgggcccccaccagagtacgggtttgttgaaataaatcaaggagcacagcttcgactggttttacctagtggagaagaaatcatgcctgaggtgtcaagtccggctcgttgtcgagcacggcgggaccctgctctctcctcaatcggttgatgctgttatccctgggtacggactttgcggagttgtgctgaacgatggagttagtgagttcatttgcgatgctccagagagttcactctttccgagacaaccatctgcctgcgtacgcgctcttacgcttagcgttgatgcaatggaagagggggtattggtgacggacctgataggattagcagcttggcggttgaaagaactttcaatctgcagaaatcgggaaatggacgatgaaaaggattcaacaacgcaagctacgctggatctgagtgggctcgcggaggcttgccctgacctggaagatctcgacgtcagcagatttaatgtggtggtgactgtgcgcagcaatgcgttgcgcgtttggaaggtccgggagatcgagatttacgactcagagagcctcccggatctcgagccttgcttgaacgatcaatcgtatcgaatggcgcgcgagctagcggtgctgaaagtgtctggggattacaattggaactacgacattgacgaaatcgaggcactgaatgcccacgacggcgagtgtctgtctctaacgaaggagagacttcccaatcagtcgaaggctgcactgatcagtgtcgtgagaagcaggaaaggagggaattcactcaaggctgtgcaccttttggatgcgctgagcttgggccgaattttcgctttcgtctcgacccctgtccaacgatcggtccagtgtgacgaatgagttgtacgctgcgcagaggtagcagtaactgggctagtttattatccgccagcaaaggtgatggatgaaacttgcatgattactcagactgtcaagtaggtcgcaatctagcagcttttcataaaaccatttttccattattatgggggcattttttatgttagtggagtactggaaaggtgcgactctactaacttcatacaacgatgtagctgtaagcatctaagtagccagtcaccgaaatgagccacatcgccaccaggttgcgcagattttgtgattagtttgaaagaatcgatgctgtaatgcgttttcaaaggctaaatttcgggtaggaattttgtaaagctagtctatcggcatcactggagaattcgccgtgaggatacgatgtcggctaaaatctggtaccagttggtgaatgcggccacgggcggtccgtttgcacacactagagcaagtgcagttcgacgcatccgcgtgtttgatatccaggatttttgtgcggaggtctacgcgaaggacctgaagcggttccagagtcttattgagagtcaactgcgcgtattcaagaaccgcgacgcgttcaacaagcagcatgagcctctggagccctccgatctagtgtctggtctaggtgaggacatcgaacatgcgctcatcgtagttattccgagcttatatcgcggttcggagatcattttcccgttcgagacgctcaaaatggtaggaacccaatgtgaagctcgtctacgggtccctctgttcggcgacactcgagtgcacgagctgcctgtgggatgcactcgtggctccggcctggagcttcgagattgtgaagaaccgctgacgcttttctgccgacctcagtttctggagcagtggaaggagatgtatcgtaactccgtccgaacgtatgcgctgttgtggatcgtcggtcctcctggggctgggaaatcgtgtaccacgcttgcgtttgcctacgctctagagccgtttcgatgggatgtgatttggcttcacctttcttacaaggacaaagttgttaacttcgtctggctacgagggaacgagaaggtaatgtgtactctggagatgtcaacgctcgagtcccagctatcgtggctactcagtaagacgtcgaccgagaagacgaccatcctgtttctcgatggatatgactttaatatgaaagaagagagagaggcacggattatctgcagggactggcaagggaagacgccaccaagcatcgattggttatcgtgtgctcaacacttcggacgagtggaaacttccgacctgaacgcgccagcaaaattcctgctgtgtttgctggaagcgggtgggggttgcatggtgtggaactagcaactccaagctccagtcgtactggtgaagcagacgttgacggcgcaacgtcgggggagaaaaatgcgatgatgcagaaagtgaacaacataaacagctttgagctcctatcctggagtttttaagactatgcaaacgcaattcgacacccaaagtttttcgaaactgtgaagaacgtctttcctccgtattctgaatcggaggatgcgaatgaagaagcgaacaaaagaatggagttactggaaatgaaatactgtgtggccggtggaagtgcaaggctgatgtttgacgtttcgatcgataaagctgtggagtcactagatgaacgaattcgtcacgtgcgggacgtcggggtcgtcgatcgtttgagggcagtttattacaaggatcaggggtgtttagacctttactacacacctttgataagcgcctacgttgcacggaaacttgctctcactcacagttttcagctgttgaggttaattgcaagccggtgcgttgtcgacatgatggatgaatggctgatggaagcgtggtttttatcgatgttgaatacagccggaatcgaattcgtggagggaggtcctgaccaggtccgagggcaatgggggcgatcggatgtgaaattctttgacccggtcaagccttctatcgagttacgactggatcgccccacgtggatcactcccgtgcagtggagcgaagtgggttttgacgccgttttcgtgggcaaggcaaatgcgctggagcggttcgttcaggttactcttgcaactcttgcggatcaccatagcttcgaccaccgatactttgtggagcttttggacaaactggcaactcacgacgatttgaaagacgtgcagctcaagatggttgagctctcctatgttgttccgaggtgtcgaatatccgtctttcagcgtcctgtgaaatcgacgggtttcaagaacatcgtccaaggtcgcccttctccggcgacggcacaagcaggggttctcgtacccgcggtgatatcgtgtttgaaagctccaaggctgaagtgaaaacggttggagttgattacgaaatatcgccctactactataatacgaccgatacgaagaggacaataagaaaagcgacataaccgacgccgtaggtacaggagctacggaggcggctatcaggtatctcgattaaccctcattttattttttgacgattctcgctgaccaattcctattcattattcgacacgtgtgagccaacgcttcgcgtgctgtgctggtaaacaccacctttgtctatttctccaatactggtattgcttgacgcctgaggtgaaaacgctggaggttgatttcaaggcgccaatctactacgcgaaggtagcgagaggtacaccttcaagtcgaaatcagagttgtcttcgctcgctgaaattgcgtttggtcggacgtgctcacgatcatcggtggtaatctacgcaagctctcggttaaattagacgacccagacattgagcacgagtatgatattgcacgcgtggccgatatagatttatgcgcgctagctgctgcttgcccgaagctggaagtacttgagcttgtattgtttgacttggttgtgctctcgccaagtgataccgctttatacaagtggccgatcaagaagattaacgttgttggcagcttaaacctacctaccaaatctggcgccatatctgagcaacccaacagcgcgaatggctcgagggctgatggagctgataatttccgcgctggatgatgaagagtttggtgaaacagcgagagatctacttgaagctcacgatggtgattttctgcctatcaccaaggaaaaaaacccgacagaggctaagatcgccatgctgagcattgtgggggggagcagggctgcaggtgaccgtgaagttgtgtgccacctggatgcggataagtattatcttcagcttcgcagcaactccagttcaacggtcggttcgttgtggtggatatcatggccatttctcggatcgagatctattctgatgtgaaagccgatttttcttttttacgatttgggataagcgggagcgcttcaatgaagacttaacaagtagtagtatttaccgacgcgtccctagtaacagagcactatcctttgtgctggtgttgacgcgaaaacaaatgtaaggtttcggatgttgtcgcccaagccatctccactgtcgtcacgtaaataccagttattcatttttgactacttttttcttcattagaatttgaaagtctgatctttcactccaagtgatgcacttgaagaaattcggatgaccgatcggtggagggtctcaacgacaaagagccacattatgccaatactcgacaaaaatgccaggtagttaaggaggcgaccgatatcgtaccgatccatgccgcgcgtcatcgacggctttctcgtaaaaaatgcacgaactcgatcaatcgtcttccgagggatactcctaagcaatacgacaaattaccgaacagcccttcaggttaaagcgtcagcggtctccttttgagcgccaagtaacttttgccatattttccttggtttttatgctgggatagcagtgggtgcctgccaaaagggtcataaggacctaacatagttaccgcagatatgcgggtagatatgtcgacatatagcctagttgcacccgccacaacatgcttatcgacaacaactccgtccgattacaaatacccaagtaccacctctattcgccctacagcgtcactttgctccggacattcctatggctagatctttctgcagtttatctcagcatgctcatttacgatatgagcacttttctgcccacgctgccgcggtgatggagctccagaatgatacgtgcgacgctctgtgtgtgccgtgcgaggcctacgtgagctacaacaaggacctgggagctgttcgacgcgcgattcacaagcggctggtggaagaagatatatgacagcctgtcattgacaggcgaggcgatcttcacaagaatgatggtcgacatattcaatacaaagtcgaactaagtcgttaagatgggtacacggcattaccgccagtttatcgagacgattttccggtctcacgagatttatgttagcttataccgagcatatctgctgcatttactccgggtccttatgacccttttggcaggcacccagtggccgataggtcatgctgctaggcagccctattcgcacctcggtagctgaagccggtagctgaggccggtatccgtggtcccgtgtcactgtctttctgttggtgacccggttactgaagccagtaactgaggcaatatcactttctgtctcctagtagagctaaatatcaatcgtgttgcgcccgtgaacgcatttcgaattcggcctgatcgcgcagattggtgatgccgtgcctacctacctacctacctagacgcttcctgcctcgtgagctacaacgattgcggcagtaccaccacgcaggccccctgacgactaggaacgcgcaaacgttgctgcaaaccttgtttcgacaggcctgtctccttgccaaaatgtgaactgttgcacgtgcgaaactagtgcattgaaagataagtgcggccaagtttttttttactgtaaagtgtaaattttcatgcatgttggcgagacgacttatatattgactgtttagaggacgacttgtgcaggattacgtttcagtgatatgaaggaagaattgccagaagcgcgacgcgctaaagatgaaaaacaacgaatggggggatattctagtgtgttgaacattggttcatgaatttggtttgagatcattacattaatgccatggtttgaagaaacagcagaatgttttaagtattcttctgtattaaaaagtactcgacgcttcgagaggaaaaactattccccatagtacggttcatagcgcaggatttttccgttgctgtatacaaatactgctttgagaactacattattcgattcggaacaccctacagcgattacaggactatagtttaaacgcaaatagagaacctcttaccccctgctttgagaaactatctaacaagtagcagtttggagagttgcgaaaacgagtggcggatggttcaatcgctcaaataatggaagcctaacgctatgctcgccacgaccgctacgaacgactagttttcaagttggtaggggtgtctgtggcgcgcgtctcgtcgactagaaatgtgaccgcgctaccaagtgtagtatatcgccgttagtatgtaggatactaacattgcgacgcccacaaatttaggaccagaaaatgacaagacatgctaaagtgcggcatttactaagaacttatataatgcgccagaatattcataaaggtatcgctcacgaagccgcctgaattcatagcgcttcttatcacttgctaggcaaaagaagcggtggatcgttaaaattccagcgatcgttgttgcggtcggattcctctttgattgtcgtgatatgtccccggatgtcagcgaagtactccaatgtcgctggtagtcgtgagacgaaaacaatttgaacggactaccgtaccccaccagacagagcatactatttggtgccaaaacccctgaaatttatcccagcctaagcgtagcccgcctgcgcgttaatttatgttaatttatgtgcatcacacgattccaagccaatcatccgcggggcactattccaccttccacggccatgatctcgtcgctgcgtctggtgcgttctcccctgcgccgcagcgcgttctctctgcgttctacctccgctgcgcgttcgctctccgccctggtggacgccaagtgggtgcgcaacgcgcaggagtccggcgatccggagctgctgctgttcgactgcaaccacccggcgtcctacccgcgcggccacctcccggacgcggtgccgctgccgctggccgcgtcgctgctcaaggacccgacgccgcaggccacgggcgtcgtgagcgcgcagctgttcgccggcgtgctgcagtcgctgcaggtgccggcgcacgcgacgctcgtgttctacgacgacgagatgagcctcaaggccacgcgcatgtggtgggtgttccgccactacggcttcccggtagagcagctcaaggtgctggacggaggcgtcaagcagtgggcggcggaggacaacgaggtggagatgggtccaccggaggacagagaggtgtccacctcgacgctctggacgcagccggtggacacccagaaattggtgggctttaacgccgtgcagaacggaatcgccgatgcgtccgcccagtttgtggacacgaggtccttgggcgagtactggggggaggacgccaatggaaacgcccggactgggcacgtgcccggcgccttcaacttcaactggatggagggcgtggacttcacccagaacggcaagttcaagagcaaggaggagctggacaaggtctttgtggaccacttccacctggacaaggacaaacccgtgatcacgtactgccagaggggaatccgcgcagcgcacacggcgttcgcgctggagcaggtcatgggattcaaggacgtcaagatctacgaagactcgatgctgcagtacctgaaccgggacgactcggtcgtggagaagcagtaaataggttaatacaatgccaagacggcaaataacatttaacttcttcgatacagcgtctctgggtgtccatccagcattgctcaagacatcagttgtgtacagcacataactgatctttttccacttcacgtttggaagatcgcaatatttgacaagcatgggcgaccagcaccttgacgcctcctccgccaagcctcggcgtgtcgtcctggtcactggcggcacgggtctcgtcggccacgcgttgcaggacgtcgtggcgacgcgaggcccgtcggacccagacgagtggcacttcgtgggctccaaggacgcggatctgcgcgacgccagccaggcacgcgctctcttcgagcgagtgcgccccacgcacgtgctgcacctggcggcgctcgtgggcgggctcttccacaacctggcgaggaaggtggacttcttcagagacaacatggccatcaacgactcggtgctgcagaactgccagcagttccacgtccagaggctcgtgtcgtgtctgtccacgtgcgtcttcccggccgagacgacgtacccgctggacgagagcatgctgcataacggcaggccgcacagctccaacgagggctacgccatggccaagaggctcatcgacacgctcaaccgctgctacgccgaccagttcggctgccgcttcacgtccgtcatccccaccaacatctacgggccgcacgacaacttcaacatccaagtcggccacgtggtgcccggacttatccacaagtgctacctggccaagagggacgcgacgccgctggtcatctggggcagtggcaagccgctgcgccagttcatctcgagccacgacgtggccaagctcatggtgtgggtgctgggccactacgacagcgtggagccgctgatcctgtcggtggacgaggaggacgaggtgtcgatcggagacgttgctcgcgagattgcagatgccatggacttcaatggggagatcgtcttcgatgagagcaaagcggacggacagttcaagaagacggctagcaacgccaaactacgtcgcctgctgccggattttcagtttacgacgattaaacaaggactgagagaagctacagcgtggtttgaagccaactacgagacggctcgcaagtaggaaggagacgcaatatttgtttttgtttttggcttacctttcaggcgggcaaacccagctctcgctacaggacttacgttttatgctatcgttcagggataagtagtgaaatggcgatgagcgcctacgtcgtgaggaaaatcgctgtcagtcgaggctctccgatgctatgcaaagtagcaagggcgcgcgggtggagttcggcgacgaaggaatggctgtttgaagcgtggtttttgtctacagtaaagacccatggggtcgaatgcgtgatggagggtcttaccaagtcgcaaaaggacttacagcgagcagacgttcttttcttcgatccaaccaaggcttcgcttgatatgccccttaaccggccagtctggatcactccgctgcagtggaacgaagcaggttgtgtttgtcgatagactaaatggtctggtgaaattcgtccaagttacacgcgcagatcgccactgctaccaacatcgatactccgtcaacttgttgcacaaactcgcagtccacgatgatctgaaagatgtgcagctcaagaaggttcaactttatttcgttgttcttatgaaggtgctgccggactttcgccgtcctgccaggacggcggatttcgagaagaacgtcgttcgaggttgcgccttcatgtttgagaagtgtgcagttgaagtaagaacgcttggagttgactacaaggtgtagggggttgtccgcctattgagggggttgagcaagcacgcaatcagcaagctgagctgagatgtctcgcgttgctgcggtggtgatcgtcgccctagtttctctcactatcggtcagacggaatgcccgtgagtcacaattcacaaacggggagccaacatcctgagtctacgtattaaggcatgtatttgagtggtctttgttagtgttttttaaaagctttaaagagctgagtgaatacatcaacaacagaaaatgtacagtacctattcgaatgtttctctaaataattaaattatgtgtaatatatatttaaaatatatatcaataatattgctcttaaccaggcctcggaaaaaatcagtattccattgtgcgcgaagttcagagagctcctgactgaagatctaccgctgctgtcagctaaacaccaagtagtttggaatcttcggcccgttgggtgttttgtcccaagaaagcaagcctccaacatggagagctttgcttggcgctccggatagttcgtccgtgttttcggcggagtttcgaccagcgatgcgcaagctgcaaatgttgggaacgactgaggttgtggattttcgtggctcggaatttcactgggcatgccggttctcagcagcacgggtacaggggtggcaggtgcttgacgatgcgggggactcgaggtcatccatgttgacatcgctactgggcttgagtgtttccccagtttttcagcttgtggccaagcaagacgagtcaacggtggctcctgcctcgaagcggccgcgccttgaagacaacaagtcaccactgcctgctggtgagatgatcagttctccgtcgacgctgtgccgatatgtggtggcaaaagatgtggactttgctgaatcaagggacttcattgaagtgattgcagctttggctcggactccgatgagcacatttacactgtgcatcgcagatgattacggtggcagagatgtggacttatgcgctgtcgtggagaacggtggctttgcgctgaacgctctgctccgtggacgcgtcgtgtgccaaatgcctgacgaagttcgatcttcattgactttcgcgaagtatgacacgtgtgatatatactgctcgtcggtgaccgacggggtatttgtggcgatctgctctacaatcgccgaaatgccatcagacaatttgctcaatagcgttcgtgtctgcgcggcaaaccgcattcggtgggagtggctggcttacatgctttgctgtggatcgtcggctggcaaactacaagacctctccatgatcggtgctcgcttgactagagcagatatagccggtatgcgagtggttctgagaaatagatatccaagctcggcttcccccaagtttctccggagtacgggttcgtgtcaatccctaaaggtgcaacattgtggtcagtacggacgccacctgtcgaaggctcgaacctcattaccggagaagcgctgacctgccgagcacgtcgttgcccagttattacatcgaaatgtgtagaagcggtcgtccctggatacggagtttgcctgactaatgttggagatggggcagcttgctttgagcgtgatgcattggagttgacgcatcaaagtcaaaatcaatgtcgtcttcgctcactgagaatgcacatgagcagaatcgagctcgatactttgctgctggatctactcgggtttattggcggcgagctgcgcacgctatcaatccaattggacgagtgggaccctgatgaagagtacgataccgaacacgttgccgatatcgatttgtgtgcgctggcggccgtttgcccgaggctgaaagttctccagctcgtatacttcgacgtggtcgtgcaatcaactaacaacgatgcgttgtgcaattggcccatcaagaagataaatattgtcttcagcgccaaattgcccaacctgtcgcagtatctgaacaacccagcaactcgaatggcgcgggggttgacggagctgagagtttctcggctggatcccggagaatttgctgaagcggagagaaatgtgctagaagctcacgacggggagtgtctgcctatcaccaaggaaaagctctcgacaaggcgaagattgccatgttgagcactatgacagcggcaagtgagtctgaagtgaggcagccagcagtgcctcatctggatgaaaatacgttgagtatcatcttcagattcgcagcaactccagttcaacgatcggttcgatgtacaggatggcacggctactacacggatatagagtaatttgtccttagaaacgtagggtgctcacgggaccccgccgttcaactgacaaaacaaccctcaaacggattcaaccatttgacgaggacgtggagtgggagctcaaagccctcaatcgagtgtgtctgtagatcattacggagaaattgccgttctggccgaaagctgcatctgatgatcagatgcagcttgatcagcgtcgtagtttgctcaacggtggagccgaaggtaatttacgaactcgacgcctagatggtattgtaattatttcaattagttcaatattttttctcatatcaatagcgcttttcaaatagttttgaaattttgcattaagtttcctttaggacttctgtccaatcagagctacaagctcttcgtggaacgccagttttgaacttcgtgcgatggctggtgcgtgggatttcctggacccatggcgctcggctctctgcgctcccacgagcccaagcgcaggggccacactctcaacatgatgctcataaccccgtgcccactagacgttgatgaagacgacgctgcaagatatcccatcctagtggagattccggagcgccaactgaaccgcaacttcttcaggaggccatcgagcttttcactcttctcttcaaggtggacggcacgaaattcagagaactcctgagtgaggatctgccgcagctttcagcaaaacatcatcttgtctgggatctgtggcccgtcggagttttgtctcaagcaagcaagccaccaacatgggaagctctgtttggcttcgtggatacctcgttgtcagtgctgtcgtcgcagtttcgatcggcgatgcaaaagctggaaaggttgggagcgactgaggattttcgtggctcggaacttcactggacgtgccgattcccagcttcacaaattcaggggtggcaagtgcttggtgaatccgaagactcgaagttaacatcgctattgaatctgggtgtccccccagttgttgaggagttggtcaggcaagttgagactacggtggttcctgcctcgaagcgaccccgtcttgaaggcaacaaatcgactcctggtggtgatccgacgagttctccgtctacactgtgccaatatattatgacacgaggtcttaattttgctgaatcaaggggtttcacggggatgcttgcagcgttggctcgaaatccgatgagcacattgacactgttcatcgcagatgattacgaagaaagagaactggactcggctgctgtcgtggagaacggtggcttaacgctgaatgctctactccgtggacgcttggtgtgccaattggctgacgaatttcgatcctcgatgactttcgcgaagtacacaacgtgtgatttatcgtcctcgtcggtgaccgacggggtatttgcggcgatctgctctacaatcgctgggcaaaccgctcaacagcctcgacgtctacactactaacctctttcggtgggtctggctggtttacatgctgtgctgtggttcgtcggtagtcgggttgcacgagctatcgatgctcagtgctagcttgactaaggctgacgtagctgctatgcgagaggcgctgaaacataggtatccacgcacaacttcccctcaggtttctccggagtacgggttcgtgtcaatccctaaaggtgcaacattgtggtcagtacggacgccacctgtcgaaggctcgaacctcattaccggagaagcgcttacctgccgagcacgtcgttgcccagttattacatcgaaatgtgtagaagcggtcgtccctggatacggagtttgcctgactaatgttggagatggggcagcttgctttgagcgtgatgcattggagttgacgcatcaaagtcaaaatcaatgtcgtcttcgctcactgagaatgcacatgagcagaatcgagctcgatactttgctgctggatctactcgggcttattggtggcgagctgcgcacgcaatcaatccaatcggacgagtgggaccctgatgaagagtacgataccgaacacgttgccgatatcgatttgtgtgcgctggcagtcgtttgcccgaagctggaagttctccagcttgtatgcttcgacgtggtcgtgcaatcaactaacagcgatgcgttgtgcaagtggcccatcaagaagatgaatatcatcaacagtgaaaatgtacccaacctggggccatatctgagcaacccagcaacgcgaatagcccgggggctgactgagctgagagcgtctcggctggatggcgaggagttcgctggagcagagagagatgtgctggaagctcacgacggggagtgtctgcctatcgccaaggagaaatttccgacagaggctaaggttgccatgctgagcactatgagagggggcggggcggcgagtgacccagaaggaaagcagccagcagtgcgtcacctggatgcgaatacgttgagtattatcttcagattcgcagcaactctagttcaacgatcggttcattgtactggatggaagctgataatgcatcccaaatatgtggccaaatcgccccaaatgtcccaaataatgaattgtctctgtaacatttaggtacatatttggggccaagtatatgactgctttctcgtaaaactatcccaaatatgtaccaaaacggagttgattgattatggtctatagtctatgggcgagggcgagtggacgcgagcgcgagcctcactcgatgcattcactaatcgccaacacccgccgattaggcgggggcgtgtctgtgcgagcgagcgaacgcgagcgctgtaacccgatatattttttctagacaccgcgcctggccgagacgaggaacttagcgtaagggacaagggggtggggcaggccgcgcagcggcgccccccgagcgaagcgagagaggggagggtcccccgcagacccgtcgctaagtccgcagacgagagccaacgcgcgagtgtccgccctgtgctgctctttcatactgaaggttattctgtcctaaatatgtactaaaacgttcccatggtcttaaatcatttgggaaaaactttaggatttggggcgttttcggggtgcattatccaatacctactggatggcatggctactatacgtttcaagagctttcctgagctcacacgagcgtgttctgggggggaacggtatagtgaggcgtagatccattatgattcacacctcgtcccgcaagctgcgaaaccctgcgagttcatcgtcgaataccgaggtcggtgctggggctggtggcttatcatccgatgctttatccgattctccgtctggtgccgatggagtgagggcagacgctgacttacttaaacgtggcgcgttcttgatctggtgcaggaagctccccaccgacgccgtatccaacgacgcgcccgacgaacggtttagcgcgctgccagcacccgttgagactgagtcggcagctgtagtcccgcttgatccaattgacgatctctccccgatcgcaaatggcaaaagcatgtcagcgccgtcggcatccaggtcgtcactctgcccgtcacttgaagctcctcctgcatcagcacttcctgatagcgacaaaaaccgtgggccaccgccagacgagctccccgctgcatcaacgatcgctaagccgaacgcgtcaggcgtgtcgggggagattccccatgcagtcacaccgctgtcgctgaaatcgggcgagaatccgcgtttcttcgccgacatttcagtacattacactcgtagtgcatgtacgagttttggacatcactggagttgctccagtctataattcttctggactccatcatgtccttcgtgggtgctgtatacatgttaactcatttcaaatacattttgattacttccggacgaaggaatcaaccttgtcgtgccaacaccattctctcgggcaaatcggtggaagttatgtgcaaaggatctataatacgtcgtatcttctcgcagtagctggcgagtattccgacagattttcttcgacggttgtacgtggaacagctgaagcaatttggctggaagacttttttgagatgcacacaagaagagcttaggggggtacatctacgtttgtcactactatgatccatcacccaaaagcctgatacctcccgaactttccaggcagttatcacaactcgtcgtgggcgtcaccgtagtcgccgtccgtagcgcctccatcgtcgaactcgtcgacgtgctggctgctctgaagcgcctgtacaatgtcgttctccatctccaacggagacgtcgtagtaccgtagcgcttgaatggctcgtggttcaccaccaagaacttggtgaagttccacttgatgtcgttggtgataaagccgtccagctgctgcttgaggaacttgaacagcgggtgcgcgttatcaccgttaacgtccaccttagtgaagagagggaacgtcacgtggtacttctcttgcgtgaacttgaggatgccctcggcagttccaggctcttggccgccgaactggttgcacgggaagcccagcaccatgaagccctcgtcgtggtatttctcgtacaactcctgcaatatttgcaacaacaaaaacgttaagcaattgtgtcaactataaagtacattgcaactgcccattgcattgcgttgacgtcgcacctgcagctcgcggtagttcttgtccgtgtatccgcagtcgctggccacgttgaccacgaggatgacgcggaaggcgctgaactccctcatggacacctggtggccgcgcagatcgggcaccgagaagtccaggaacgacgttggcgtctgctccgcttgctcattcgtgctggcgctggcgcctcccagcaggaacgccgccagcgtcagggtcagcagcaacagcaacagcaacgtccgcatctttttcctttatcggataccttcgtgtgccgctacacaactgctttctcattggctgaaacgcatcctctcctcccattggtccacatgagatctaaaaatggcgcgccagggtttggttcaaaaagcgcgcggcgcgggacaagacgagagtgatcgtcacttccgcactcgctggcacaggaaggcgctaggcgtgagcatggcgtcgcaggacggcgcggacggcggcgcgggcggctccggggtcaccccgcgctccgtgcccggcctgctgcaggccaagaagccgcgcagcagccaggacgtgcgccgcaaccgcctcaacatggagaagatgatcatgaagaacgtggcgggctcgcgcatcggcaccaagaaccgcgcgcagcagatcgtggaggcgctcaagaagaagcgccagcagcagcagcaacagcaacagcaggagggcgaggctgcagcgtcgggggccgcagcggacgacgtagagcgcgcgcccaagcgcaagaagtcggagccgccgccacccagcgacgcagctacccgaacagcgctggccgccggcattttgtcgcccactagacgctcgaacgcggcagcgccgggctttacgagccccgcgaggcgccccacctacccgccgcacatgaagagccccacgccgcagctgctgagccccgcgcgcgctaggggtgtcaacccactgcatctggccagtcccgtgcggccgccaaggagtgcggcggcggctagccccgcgaggcctagacgcagtgccaacatggccagtcccttgagacgcagcgagttcctgaccagcccgctgaggcacagagcctcggcgtcgcccaagaggccgttgacgttcgatgatgccacgactactagtacggcaccgggagaggctagttctacgaggatcaacggacacccgccgctgctgtcgtcggcgttggatcaagtggagcttgctcctcctgctaagaccaacaaggtggtgcgcgcctcggccaaatcacctttccagtctttccaggccaagttcaacaagccgtctcctgctaaacctgcaagagcgacgagcagtcctggctcggcacgtgcaggcccagcgctggttattcctcgaagcgggccaacactgatggatctgacgcatccagaggagtctgcgggacaacaaactacagctgcagctcccagtaatactgtgtcatctacttcggtgcaagatgctacagctacgtgcgcagcagatgcatcttcgggttcagctgcaccacccacttcttcgagcaatggtgcaagtggagataatgccgccccagcgtctacatcgtcgagtaatcctgccggagctccacctcctgcgccgacacgaactccaaacacaccgtcacagccgcctaagcctgtgcgcaagttattctcctcccgtgtcgttgtggctcagaaatcaatctgcttttcgaccgaaggtgtggcgacatcagtggatgtaactccggatggtgaaattgttgtggttggctttacggacggctcggtgcgactctacgaaatggatagcagcgttccgagcgatcgtcacggttacctcttgggtcacattgatgagcagtcttcgcagggaactttcaacgttcatttgcgtctgaaaatctcccctgatggccgctatgtgtttgtgggctgccggcacacacaaccccgcacgattatgagcattaatttggatcactaccgcagcgagaaaggtgcgtattacttactgccttcgcaattattatctgtatactaatgtttgcacttcatattgttaatgcagatggcgacgatgacgacttccagcaatttcaaaagtacttccataacagcagcagagttcgggttagttgtgtttcgccttttgcattgccttacctgcactgatgccataatgtatgggttgatttttttagggctttgctgacgtgacaacgtacgttccacccgtcggccaagttcaggaaaacaaaggcaaaaggtaagctgaagtcagctttgctgtagcatgttataatagctaaatgttctgtccgcataatgtggcaggtctgcatactacatcctgaccggacttggtgttggcaccatgaatttatggcgtttcgttgaaccaaaccagcaccaggagcccgtgtgggaacacttgcaaaattttggtgccggcggtaacacggcgatggttggggcatttcttccgtcaagcctgtctccgggagtgctggcgattgcagcagcctgtaaggacaaaaatatgcgtgtgtggccgctggaattccgaaaagcgtcaccgggctcagcttccgcgaccaatgatgactcggcttctgaaatggacgacacggaattccttggaggagttcacaccgtgaatacccatttcaatatccaaaacacggcggatatttgctatggcgcaattcatggccagcatgcgtacggtatttctctcatcggcgaagcttaccggatctgcttacctgattcatcaagcatgagtagcgagccctgtgaacggctacctcgtcaggagtttgagctggagaagatcgacgggagtggaagcagcaagtctcgtcgttccaacgtcatgctcgagccatcggggctagcagctagcgacgatggaaaggcggtcgttgctgtgtcgacggatggcatattttactactcaaacaacctacctgctgtgggctcagctgatgcagtgaacctacgtatcatcggcaaaaatgcatcggagaatacgctttttaaagcacccatgagggtgtacactccgacgattacctcgaatggcacgaaaaccaagtcagaagcgatgatggctgtagccacaaacccaagcagcgaggattgcgaggatgaagatggatatatcaacgtcgaccccaccgaggtgtttgcagcgcgatggatggtgcctagtcgtggagcaaactgctgggtgtgtggagtgcgcaatgtaagacactggatcgggccaccagaatccaagtcaaagatcaaggaacctacccgtgctcaactcttggctgaagaaaaagagaagaagaaggttctgctccggcgagagcgagcgctgaaaagggctcaggacgccgctgctcgacagcgaagcagtagtaacggaggcgacccggagacaccatcgagctcaagaaccaggacgcccgtttcaagcgcttctcgtgctaagcaatccacaccaaagcaaaaagacgttcagtctgatgctagtgcggacagcggctccggaacacctcgcttgccgccgcctggtaagagacggaggataagccaaacgtcgggtgcgggtgatgatgataacgacgaggactacacaggcagtgacgacaatgccccttcggttgcctctctaatgaacgaattggagttcttcaagaagcgcaatgccgagatcaagactgaatggcaacggcggcttctaggcgagcgtcagctccgtcgcaagtggaagcagcgcgaagaagagttccttgagcaactgaacgagtcgctaacgaaactggacgctgcagagacggaggctagcgagtttcgggtgttgctgcgcgatgctgaaaaacggttcgcgttcgagaaggcgcgtgtggaacaagaaaactcggtgaaggcgcgctacgagcagctctgcgaacagatgaacgagaaaatggccctcgtagctgaccagaagcgcttgctggagcagacaacacgcagtctactggctgaagtggatcgtaatgtccacgccttgaagaatgccgtgatactcgagaagaccgagtgcgtggtgtgcaaggaccagcaagcggtgactgctgttgtgccttgtggtcacctgtgtttctgcgagcaggacgccgagtcctaccgccgcaactgcacgtcggagtaccccacgtgccccatttgccagcaggagatcgtctcgctgctgcgaatttacacttgagatactacgtaaatatccaaagttcatagaagtcaacacaaagtttgaccaacatgaagtgttctgcgttgtgtgtgcatgtatttgtcaggaccagtgctgggacgcaaatgcattcatatgtagtgacaagttatgcaagactgagaagtcctcttatcaactacgctaccatagaggtatcacagggtcaaaggcagcagtaaaacatttttattgaatggcacgaagttcaccgttgccaacgcggagttcaatggcgagcaccgcacactgcaatagaagaataggagcataggctagagtacactacagagcgtagactcccgactcacgcgcgagctgtttagtccgagtgcaggccgagaggcagggaaggagcctgcgtggcgacacgcacagcgccgatggcgaacacctcgcggcgggtagcctggtgcacgatctcaatgcgctcgcccgggccagcgaacagcacggtgtgctggccgacctcgtcgccgagacgcagcgagtgcgtcggggcctggccggtctcgcccaggcagggagcgcccgtggcggcaagcgacttgaccagagtcttggccgtgccgctgggggcgtccagcttcttggtgtggtggatctccgtcacctcgacgttccagccctcagcaggcagcttgaaggcagcggccttgatgagctcggacacaaggggcacacccaccgagaagttcgagcggagagccacgggggccagcttcgagtaagcctccaggtcctccatgggcagagcacccgtggtgccgacgaccagagcgggcagcttgctgatcttgccggcgtccttctgctcgcgcaggtacgagatcaccttcttggtgccggcgggcagcgtcacgtcaatgacgacgtccacgttgttgaggtccggggcctggacgccggactcgaggcgggtcacgatggcgccggcgaagctggcgctgtggtccgtgagcttgttgagctcagcgacgatgagcgagcccaggcggccgtcgtggccgtgcacggcaacgcgcacgcccttgccctcggtggtgcccttggcggcctcagcggcggcggacttctgctgggcagcgaacacctcctggtactcgcggatggcgtcggacagacggcgggcgccgagctgcatgtcggggaagtcgtaccacgagaaactcagacgcaggaagttcttcatgttgctgctgaacgaggctccgggcaggaacatgaccttgtgcttctgggcgatgggcagcaggtcgttggcgttcatgccctccggcagacgcacaagcacgaagtagccaccgtcgggcacctcgaaggtcgcaccctcaggcaggtgagccttcaactccttcataagagcatcggcacgctcccacagcgtctgcacagtcgtgtctaagtgctgctgctgcaggccggacgagatggcggagtggacaatacccgaaatgacggggttgatgccaccgctcgagtcgagctgaccgcaggcctcgatcttgctcagcagcttgtgcgagccctggatccagccgagacggagggcgggggccagaatcttggagaaactgcccagagcgagcaccgtgtcgtgctcgtcgaaggtgaacatcggcgggggcggcgtcacgtgcgggaaggacagcagctggtacacctcatcggcgaggatgatgaagccgtacttaacactgaggtctacgaggcgcttgcgcttctcagccgagagcgtgcggcccgtggggttgtggcacgtggggatggtgtagagcatcttgggcacgatgccgcgctcgaggaggcgctcgagctcgtcgatgtcgaggccgtcctcctccatgcggatctggcgcacgttgatattgaagtccttcatgatgctgagcgccaggaagtaggacggctcctccatgaagacgaggtcgcccgactgcaggaacagcgagcagatgagcgacaggccgcccgtcacgccgttggtcacgaagagcttctccgggtccacctcgtgctggtagcccttggtcaggaactcggacagcgtcttgcggaacttggggtagcccttgatcacgccgtactgcaggaacatggggtccgtctcgccgaacttgagcgtcgcggcctcgcggatcttgtccagcggcagcatggagggcgcaggctgtcccaccttaaagttgatcatctcgtccgccttgggcacgtcgtactggccgtagtcacccatgttgcgtctgttagttgctttgcttggtcttgcttgctccgaagaggtctaaagaggaagtgacggtggagctcatgaggagacgttcacgtacgttagcgccgggcctgagtggctacgcagcaaggcgcctaaactaggacaatcagccatttcatacattttgcaagtatacattccgacggcggctgttaaagcgcttaaactaggatacatatggcgctaaggtaggacgggagcagtagtgcagaaccgcggggcaaacacgggattggctaaccgcctcatccgcggacgggatgggatgagcgtcaagcatgcactgcaaattgcaccagtcaacactgctccactggagcttgtcatgcgcgggcgtccatgcagccgaggcacgaagcggatggatggagtaggatgggtgtttgcgtgtttggatgtacatgtattaataagtgctgaaccaggaacggcagggaagctaccggttgtcgacggaatgtgctggggggccgagtttgcggtggatatcgttattagaggttgtgacggcgatcgctgcgggtgcttcggcttgtggttttccacgtgcacgctgtgattgcccgggttggaccgtaacgccgattctgaatcgtaaagaatcatatcatagagcagctttcatgccgtgtcgtccaggaaggcgcgcggaggcaaaaacggtattggataatgcaccccgaaaacgccccaaatcccaaagtttttcccaaatgatttaagaccatgggaacgttttggtacatatttaggacagaataaccttcagtatgaaagagcagcacagggcggacactcgcgcgttggctctcgtctgcggacttagcgacgggtctgcggggggccctcccctctctcgcttcgctcggggggcgccgctgcgcggcctgccccacccccttgtcccttacgctaagttcctcgtctcggccaggcgcggtgtctagaaataaaatatcgggttgcagcgctcgcgttcgctcgctcgcacagacacgcccccgcctaatcggcgggtgttggcgattagtgaatgcatcgagtgaggctcgcgctcgcgtccactcgccctcgcccatagactatagaccataatcaatcaactccgttttggtacatatttgggatagttttacgagaaagcagtcatttacttagccccaaatatgtacctaaatgttacagagacaattcattatttaggacatttggggcgattggccacatatttgggagcttccgcaaaaacaaccctcgaggcgggacagatctacggtgctgtgcctttgcttgtcatgttgcgccactaaacagcgtcgctagcgtcaggacgtcccgactgctctgtatcggcgcgcacgaactcataacattcataaggagcataacagcgatgccgataaagaaaaatactcactgacgtcattattaaatactcttccggtagttgcttgacttcgttctatcaagcagatcaccactgcggctggttgtagacgccacgctggaagaatggggcaaacaccacggccataaagagcagcgtgtcgaggcggtcgagaacaccgtcgccaacacgtagatacgatccagttttcgagatcttggcgatcttcttgagactcacgaggaaaagctttgccacatgcgcgcacgccaccgcgcctgcgctcgccagcgccacgaagtccgtgttcatgtcaaactcgacgaaattggcagcagcaaacgtcgcgccaacggcgaagccaatctccccaagcaacttctcgaggttctgctgtgacgacacgtgcttcgagatcggatgcatccacgggaactgcactgtcttcagaaggcgctcggtaaggaacgctcctagctcggaactccacacaatgacaaagaaacctgctagcgcaccacttgcacgaactcgcgtcgactgctcgaacagctccaaaacagcggcagcacagctgaggtacagcagcccagcgacatcgagcaccatcataagggccgactccactgagtccttgctggttacggcgcgtgtcacgagcaacacacagacgccaagcagcagcagcgagtaggattccacgaccaccgccaggtatttgtccatcgctcgacggctgtccaactccgcaccaaaatcctcagtcgagccacttccgttgccactcgcatcaacaacgctcgcgttgttcgtagcactgcgaagaatcacattcagcgacgacaggaagaagtacgcgtaccgggtcaacacgcacaccgccgtcgggacgttcggagccaacagcgccgagaatgtgccgacaaaagtgctcactccaacgtaaatcatgggcatctgtgtaatgcctggcacgaagcagagccccaccgcggccccggcagtcagcgtcgacacaacaaaagctgcgaatcccgcactgccgcagcacatcctctcagcgatcgccgtgactgcgcacgtctcctcgtccaccgcgtaggcgatgatctgtctgtacatttccctcgacgtctgcttctcgtacagcttgaacggcataaagagcttgagcctcacgcggtacgccagccacgcgaactcgtatccagcgacagccacgaacaccgcgtagacgtagggcagcgctccgccatgacgcacgccgtgctcaatgtccacgggcacgtaggcggccagcacgatgcccgcggcgacagccaacagcagcagcgagtcgaagcagaggcggagcacttggcaccagctcaggcgcttggtcgtggcctcctcgtcgtaccacgagggctggccgacgtcctcggagacgcgctggccacgcagcatcgcgacggacgacgggcgcaggatcgcggggctgtcgtcgcccagctcggggtccgggtgcgcgtccgacgggaagctcgggacggagaacatgccgccgccgtcgccgaggacggggtgtgaccccagcggacgcagctccagcatgctcatggtcggcgacttggaggagtcggagggcgaagcgcttgtgcccgcgcgctggctgcacggactcgtgctcatgatgcggcgcgaggagctgcggagctgctcgctggaaaggcggaccaaaggctaataaggcgccaatactgaaagcaagtgatcgtgaagtcagaaagtcgcgtcagtgttcggcccgaccagctggcttataaaggatagaggtccgcgcgtcacgtgaagaagctcgatatgacgggaatatagttataaaggttttaggacaacttttccgcaacaaacgcgcaacggaacatgagcaacattgcaacttcaacttgatggcaatcttccagcacaggggtgtatattgtattaaactttattaatacttgttgagcccccttaactaacgtgaggcgtgtccataaaaccacaatcttctcccccacctacttattggatagcctcctcgcgttgaactcgtcctggatctcctgcatcgtcttgcccgacgtgtccgggacgactgtgtacacaaagaggaacgacagcgcaaccgtacacatgaacggggtgaagctgaagttgaccagcgcagcagcaatgtacggatagccgagacacccaccgcgaggctcgacagccagctgcaacccacacaaacggagttacccattgcgcgcacgtcgtccgggaacaggtcggccatgaccacccatgccagagacccgagactcgagccaaacgtcgtcacgtagcatgccgtgaacacaatggcgagcgcaggcagactagcaacaagcgacacggtgatacccaccgcactaaaaaacatgcccgtcaacccatacaggatgagcttgcggttgcccaaacgcgccgctagcatgccacagaacatggtcggcagcacgttgacaaaattgacggccacgataccgatgcggtcgtccgagatgccagcctgctcgaatagtgtagacgagtagaaaaacacggcgttgatgcccgtgagctgctgggctccagcgacaccgatggccgtcagaagctgtcgaatgagcatcggcgagaacaacttggcaaagttgcacggctttggttcgtccgtccttgtgtcgttttgttgcggtgcaacatactcgctgcctgaggcaactcgaggatggttctgcttgatccacgtcttggcgagatacacgttttcttcgccatacagtcgcgccagctctctctcagcgagttggttgttccccggcatgagcagccacgccgggctttccacgatcacgaaaggtgccagagccaagaagagcaccgccaacacgacagggaacccggcaatgtagcgccagccactacttgtgtcggcgaagaagaacgtgatagcaaccaacaggttcccgacagtaatcgcgatctggaagcctacaccgaggctgttacggagacttggtggagagatctcactgatgaagccagggatgaccgctgtggcaccccctgatgcgatacctgagaccactcgaccaccgatgaacatccacatgctcgaggcgctcgcttgaaccacagcgccagcgatcatgaagaggcagttggacatcatgacccgcttgcggccgaacttgttggagaagcgtccacacacgagcgctccgatcatgccaccgacgatccaggcgctgacggcgatggtccactgcgccttggtatgcccaggaaacatcagacacgtgccgggtgcaacgggcctggcatcgcattcgtcttcgttgttgaacgtcgtcaggttcagctgtgtagtcgaccacccgtactgcagcggctgaagtagagccaccagcacgttggcgtagagcacccaccggggccgaacgggagcgtgcacatctggagcgggcggtgccgtggacgcaactttgggcgtcggcaccacgcgaacgtagtcgctggtgctgcttggcgacggtgatgacggtacttgcattggcttttgaagctctagagtggactcgacgatcgacttgttggctaccgggcgaattgaaatctgagcgagttgggccaagagctgcaagagcagcgtgactttgggtttcgaacgcggatctgcgacgtccaagcagcattcgatttggccagcccaatgcagtcaggccgagctctcggcgctggtcatgcagcaccggcatcaattatcggagtcgagtttcgtgatgcggcggtactccaaaccataatcggatggagacaaaggtcccgcccggcacacggccgaaagttgacgggaagcaacaagtcgctaaagaaagggggatgggcatgaataacacgtacgtgaggcaacttcaacgccaccaaagctgtaaactcgaccatcctcttgcactcgtgactgtgagaataatgtactcgggcagctggactgcctcagcggccagcgggcctgctcgccccgtactacagtagaactaaaagataagctgcaacatgttagggtgagttccttgacgaacaagctgtggctttgatttgggactgaactcactacgtcttcgctaatcggacttggacagcattcaattttgcatgtggaagtacattattgttcaaagtgcaccgacaagtagagaacacgaatgtcaacgcgccttgcaactactcacatgacaacgcatcccttctcgccgtcctgcagatcctcaccgtcgttgtaatcatcgtcgtcgtcgctctcggccttgcccttcgttgcctccttggacgtttccttggcttcgtcgccttcagcgcccttggcgatcgtctcacccccttcttgctgcttcttgatcaccttccgcaaccgctccacgtcctgcatggtgagcacggtgctgttgcggatcacgagctcgtcgtccaagccgaacgtcttgcacttcagctccaccttgcgctgctcgccgttgtgctcgtccagacccagcagctcgcccattgtgttctgcatgaacagaggctggttactcacaatctcgatctgcgcgttcagagctcgagtcagccatgccagctcagtcacatcgggcacgctcggaacacccttgcggaacacgacagccgacgggtagagagcctcgagcttgaccttggcaatgggcaacgagtgtttcgcgacaacgtccaggtcgtcgaagggcacggacgtctgcgggccgtagaggatcgacatctccttcgcaccccacacgatcttgtgctcgccagcgccgctagcagcgtctccagggggagtgcagctgaccttgtggtccttccagtgtcctcgctggcattgcgcgtcgcagtagaaggtgcacttgcagcgggtgcagcgcttgagctccttgcccggggcagcgcgtttgtcgcacttggcacaacgacgcagctccgggttctccattagtgccagcttctctccaggaggcagcacgcggcgctcaagatcagcgcgcgtgtaaaacagcgccaaaccgcggatatggtcaccactttcgccgttcggcccactgcccgtgtgcgtgctgatgacagacgagaagacagtgcctcggccaacctggtgacgcgcatccagccgcagctcttcctcccccaccgcgtccacctgaatggcctggcgctcggcgaggcggttccacggctccagcttggcgtatttatcgcaggccgagtagaaggcggacagcgcctcggtcgtgactccagcgcccgaaatcagtccaggacgctcgctcacctccgccacggacgcaagatccttgcggatcaagtgctgcgagagctccctaagtaattaagtgcgtcagcatcaatacagccccctatcaacatgcaatatagaccaaagacgtactgaatataagcatcgatgccgtccgactcggagagatatgagcactcgatccccagcgccgagtagcttttgcgcagctgccccacaaagttcttgtccgggaacacgaccttgtcggggcggtgctggggcgtgctcgtgggtgggtccagcatggcctgcagcgtcaggtccagcacggtctggggcgacgggtacacctccggcgggtcacagatcttcttggacaccacctgccccagcgggtacaggttgttcaccagaatgcagtacgggcggcagggcacggcgtcttgtccctcctcagcgccggcgctggacgccgaccacactcggagctggcgcaccaccacctgccacacctccaactgcttcttctccagcttgcggtagcgctccacctgcttgggcgtcagcagcatctccgtgctcaccacaatgtcggctacaagcagcagcaagcgatacagtcagccctgttctaattgagcattgacacatggctacattgtgtgtatttgggcacgaaccatcgccttccacctcgaactgggtgggcacacgaggcacatcttcactgtcagagtccgagtcatccttcaagtgcagtagcagcggcagggaggcagtagcagcggcagggaggcagtagcagcgtcaaaaacgaggaaaataggtaagaatttgggtagtcgacgggggatttcgactttactagcgatccagacgacctggacggcacgaccggcaccgccaggcgatggacaaggcggtgcagaagctggcacgcacctggaagttgttccacttctcgtaattcttggtcaggaactgctcggacgtcgccatcgtcgtcccctatttgttctcttctagaagagggaactgagtactgagactaaaagtgtagccatagaggactatttctgagtcacgactcagccatggaatcagatttgtgtattcttgatcgcagttccgtcactttgcatccaagtgtatcatggagaacctggtgctgatgctgcagacgcagcgcgaggagctgctggccgcccacgccgccgccagtgaccgcgaggccgcgcagcagctggcgcagcagctcaagacgctgtccgaggagctggagctcgtggcggccgctgcgacgaccgcgccgctcgccgccgcgctgaccccggacttctacgcgagctacctgctcgtcgtgctgctggcgaagaacctgtgcgcgagcaacatggctacataatgtaagatgggttggtagactgaaagacggctgcattgtcccctacctgcaggaacgacgcgcggttcctgtggaagcgcatcgtgcccgagatcaaggaaaactccgaggagcttcgcgctgtgtgggagattggcaaggcgctgtggcagcggtgagagacgcagagatcaagtgagttaatgcgttgcagttgctgacgagtacttgcggttttatggggacaggaacctggctgcagcctacgccgcgatggactacgactggtctccgtccctgcaaggactcatcgaggccctgaagagtgcgtcaagttcttctcattgagttgctgtgctggagctgatgctgaacttgaatgttgctgctgtattgtggtggtatttgtgtagctgccactcgtgagggcactgctgagctgctgagtctcgcgtactcgacgatttcggtcagcgacgcggcgctggcgctgggcttcgctcggcacgaagacgcgatgcaatgtacgtaactactagaggtagcattgtgctggtgtaagtgttaagcactcacgtttcattgttgcaatagactgctcgtcgctgaactgggaggtgaacgcagcggaccaaatgatcatgcccaagccgttgggcaacgtgcgacgcgggccctcgacggtcgtggacctgaaccagctcgacacgctgtccaagtcggtgctgcatctggaacagaacacagtgttcaagctgccgtgaggtaggcactaaacacacggccccgctattcccgtcaatataaaccgtcgcgtgccgatctttcagacaccccttggctccacctgttgatcttttagatacgctgctgatggagaagcgcaagtctgtccgtcacaggactggagagcgcaaggcgtcggcgcgcggtgtggccagcgacgccgagtccaccgtcagcacgcgcagtagcagcagcagcaagagcaacagcagtagctcgtcgtggaagcagaagcagcgacggcttaaggagcggctcagcagtcgcagcgatgtcagagcaggagaacaggaacacagagaaggtgagcaggatgcagacgagcagttgccgtcccttgaggccagacttggggagattgtggagacgacagagatgcagatgaccatggtcgtgctcatcgcaatggacattggctgcactgcattggagatgcatctacacgaccagcagcaattggcgttggcattacagcagctcattagccacggcgacaatgcaggcgcaagcttagacgtggctggatcggtgctggcgaggattgcgactcgactggtcgagtccttcaccggcttcacgctgttcctcttcttgatcgagttggccgtcttgctagcagcgttccggcgtcagttcttcgcgcatgctgggtatgtgctggatacggcggttgtcggagtatctctggcgatggagctctacgcgcagtcgaaaggtgagtgtctgcggtggcttgaaattataggagatctctctctcaccttcaccttcgctttgtagctgtgcggttactggggattctgcgcgtgtggcgcgtgctgcgtttggtgcggagactcgtcgaccaggaacgcgctgcgcacgacgccacccgtatcctgctcgagcaggaacaactggtacgttcttcaagcgttatggctttggtggtggatacggatctgaacgcgatcgtcttgaaccacgcagaaactcctccacgttcggatgcagaaggacgcagcgcacgagtcgctcaagcgcgagtacgaatcgcgcgccggcctcgagcagcttctgcgcagctacaaggacgagatcgtgactctcaaggaggcactgcagatcgctgcgcaggcggtggccgaggcgacgatgactgcaagttctccggtcgatccgaacgacctggcggaggatgcagtcgccggttcatatcctccagcggcaggcgacgaaggataccagtacatgttccaggaagatgcccactcgacctatccgcaggctgaggagggtgtgcgctactggggagaagagcaggctgcagtgcatcctgcagagatggcagagcgctgggcaggagaggacaatgcatatcaagtccaggacgcagctgcagtgcatccagcagcgctgctcgagctagaagaagagcagggggatcatcaccaagaaacggctgctcctcaggttgcagtacatccgacggagctgcagacagagcttgagcacggacaggagagcgagagggacgagtttgaagatgccgtggatgaatagcgcggagagctcgacctaccggagcatcctatctattaggttaccacccaatgcagcgcttgaacttgcctcgccgaaaggtatctatgtgctcgcgcagcttcttgcacagctcgaggaagactgcaaaatgaacgcgcgttttgaaacggtgcatccgcttgacacgacgcggcagagacctctaggcttgaccttacttctccgcacgcttcttgtcccaagccacgacgtcttcgtacagaatgtcgccgccgaagatgtccagagcgctgccgatcgagagatccacctgccacgacaagcgacttagaacgagtttacaatagacaggcaggcaagcgtgctgtcaattcatcaccttgccgttaccgatgcgctccacgaagtccagatcatcctgttaacacgattctgtgagcactcgaccacatgacgtgcgctacgagtgaacaaacgcaccaaggagctagcaccgccagcgtacgtaacggggagggggctccacttcgccaacagctccaccagctcttgctgcaacagataatagcaaacgactcggtcggtcagtatgagctttaaagtccacagtttaaccacctgggaggcttcgcacctgaatgccgcagcgcttgccttcaacgtccaccgcgtgcaccaggaactcgtcgcagtactccgccaggcggtggaacagagccttgctgcaacacaaagccaacgttagtcgctaaggagcggctccaaccaatatattttgcccaacgaacgcactcaatggacgtggtggtgaacttctgccagcggtccgtcatgacgtagaacttgttgtcctccgccttcttgcggcagctcaggtccagcaccaggtgctccttgccgatgagctgcttgagcttctccagccgctcgaagtcgatctggccgtcgcggaacacgtaggacgtgacgatcacgtggctcgcgcccttctccacgaagaactggcagttgtcggcgttgatgccgcctagcagcagccatagcaatgcacagagcaccctaacatcaggtcactgcaatggcacacacaagagctcttgtactgaccgcctacttggagtcctcccggataggcctgcagcgcctccagcgccgcgttcgtgttggcttccgaggctccgagcatgatgacatggcctcccaccagtccgtccttctggtacatgctgtggcagtacagaaaaccattggagacgcgttagaagcgatggatgagggaatgcgtcggaatgacaaaaagtgtcgaggcgtttttggtgacgcaccgcgcgaagtcgccggcgctctgcgaagccacaaagttggtgacgggcgcggcgccctcgctgtccgtgagcgtggagcccacgatctgcttcacctcgccggcgtggatgtcgatgcacggccggaagcgcatggtggttgatggagctctacaaaatgccggaatgcacaatcagtgaatggctacgttgtgtgcgatgaacacaatgtagccatcagattgcaacaagtacttttgggagctgcactgcctactctaattgtctgtgcaaacctattgctgcacgacaccgttggtcgctctctgctgtgaaagtcattgcttccggcccggacagcgttgcccgctgcgtcagcgcgggggttcacgacatttttcaccgccgttgcggggtgcagcaccccgggcttcaacgggcctagcatttttttcgcggcgcggcgtcgtctcgggcgcaccggaaggcgagaccaagcttcaaggaacaactggccaaagttttgctgctccaaactttggccccgtaacgccgagcaaaactgttgagacacacgcagtctcgacgggctccgtgacgacgccgcgggccgctcctcattgaggccgtggcgtccaccgagaaacctcgggggccggccgccccgaggtttcttggtgcgcgacctccaccagcaatggctggatcctctacgacacacgttgcagtggcggccgggcagagcagcggcaggacttccgcgtcacgtcaattgtgcgactcggcgagtcagacgcgaagctgcggcgcctccgcctctgctcgaagccgcgtgcttggcttgcgtcgtgccgccaagagcaatatcctgccgaagacgcaggaggcctgtccattgtcgctaccgccgcagtctgcggtccgcagaagcctgcgagttgtgctgcacaacttgtgcatcctccgtatccttatcatcgcgctcggcagtgtgcatgcgcatgtaatgccgaagccggagaccaacggtcgatttccttggcggacatggtgtcacatggctcggaaattgagctggaaggcccaacacagatctctgcgatgcccgcgattccttgaggcagcttggactatgaacgaggttgcggagacacacactggtgcatggatgaaggcgtgcctccagcttggtgactaggttgattttcgccatcacgcccaacgcaatattctcctcgaaaagtgaatttcgcagtaggccaacttcagactaattttagatgcttcaaccagtgtagccatctccatcagaacttcgctacttggctcgttgacctaccatgggcggcatggagactgcgaccgctctgcagctgctgcgcgcaaagcagaacgcgtactacatccaggccgtgcaggatgcgctgcaggcggaggagcagcggaagcagaagctgcgcaaggccaccagcaagcaggcggccaagcggttagagaagcagtttgcccgtgagcggagctcggatcgcgatcgtttgcgccacatccaggaggaccacgcgctgctgctgaacaccaaaattgccgagtggaaggcgacgggcggggtggtcaaagtggcgcccgaagctggcgacgctcagcagaggacgcaccggcagaaggagaagacgcacagagcgaccttctcccaggacaccttggatcggcttgcagggcctcgcgcgccaacggcaaaagcgggagaagttgaaggtacgtagcggcacaatgtactgggcgcagccattgtgcactaaccatggccgctgtgaagatcgtcctccaacgtccaattcccgcggcaccgttgagacatcacaggagctcgagttctacaagaacgtataccggaagcaagaccgcgctcgactgtctcggaactcaccgccgctaccaatgctcagcgctgcgaatctgcgtacggtgcgtagctgtgggcgagacggccagtccattaactcttccttactgacacactagtgtgcagatgtcggaaaccgagctcctccgcacgaaggcgaatctgctctcggagctgcacggcgtggtgtcgctcgaggcgcgcatcattcaggacgaccagtgtaccgtacgctcgtccgtgtcgagctggaagtccagcaactgtccaaatcaacctccgagatgtgggcaacacgcagacgaactagcccccacaagctgagtacatacagcaaaagtaccgacctcatgagcgctgcattattttccatgcgtcttagcatcagccgccctccactacagcagctgagcgaggtggaggctattcgtcttccttctgcggtggaggcccgcacggctgcagcatcttctccagcatgttgtagcgcacgcggcccatggactcgttctcggccacggcgaagtacgcgagcatgtccgagtggcccaggtgcgacgccagcgtgtcgcggtgctggttcacggcccactcactgcagtaaataaatcaaagcgcaacggctggagtcagtacgagcaggccacacaaagctgtctatccgcacgcacaatttggtagtgtcggcgtggccggtgcccacgtatttggcctgcaggtgctcccactgccggttgatgttgaagcggtccgccgcctggtatacatcaccacacagatacacacaaaggggccgcgcgggccggtcagcgcgaggccgcgagcgcggagtcgccagcagatccacgcaccatgatggtaggatggcgaaagttcgcaatgtgaaaattgaagtgatgtgtaccacaccagtacaccactgtcattttttcgaaacgcgattttcacgagatcacaaaacattttgtgcggcgagcacttcgagcagcaagttggcggacatgccattgcgtgacaactgcgtcgacgccactgcgctcgcgacctgtctggcatgaaaggcgacgtcacgaatgccgtgcctcgctgtcgtgcgcgaagcggccggcggcgttcctcgtctggttgcctctggcctcctcagatggtgctgcgtcgatcgaaatggcggcggcggggcatcctccctgactaagagcgcgctgcagtgcgctgccacgaactcaggtccttccggctcgctctgcaacattgccaccttcgtcgccacattgccccgctcacagtcaatcaaacgggccgagtgaagccaagcgggcagaagcgccgagagccttgcgccgcgtggctggccagcgaggcacgcgcgctgctgccgccgttcggttgtgagcgcttacgagcgctaagcggtgatggcgtcgccgcaaacgagcccgcgttgcagtgctctcgccaaccagaaagtcccagcgtcgcccctcacgtcacatttccattgcgacttttttgatcagaaattcgccttggggatcgcgactgctggaatgaccgcatctcgcccatatgcacgtccgaagcggagccgacttctacatgtacgcgcacgtccctcgtcggctcaacggatcttgctgctgctgtcgatcggcgagcactgtatcgctcggagcaagtgtattcgctgcgtgaggctctttggaaagccgctgctcggctggtgggggcggtctccggctcgttgcacctgcagaatctgcgggtgacctgcagaggacctgcagaggacctgccagtggcagtgccactggcagtgccaggtccgagctcgatgataacgatacggacgcagcaccagtggataggccgccagcgctcgctcgctgacgccgacttctgcagcagcagcgagcctgcgggatctgcaaggccgacccgctcttgactcaatcgagctgcaatgcgcggaggaaagaggcactgcaaggtgccgtggacttggcggaggccctgctgctgcggccgaaacgaggctttcgcgcaccaagacgcctcgttttggtggacgacacgggtcctcaaagaggcctcggcggggggggggggggcgaattcaggcgcgggaccacctggttgcacggcaggtttccgttgaagcggccaagcagcgtcgggcccaagttgtgtgtcctccctcgttgaagtgcggcctctcccgccccacggtatatgcgccctggtgtatgcgccctgcagcttcccccacgtcgatgcagccttccgctggtcgtgtccgccgcaacagcaacggcaacgggagaatcaagcgcaacccagcttttcggagcattttcgcagtccattcagccgggttctcttgaccggctgcgcggccgctccccgaaacgcgatagtgcaggggctgcacgctgatctctgtcgctgcggtttcatcaacactttgaatgctgcggcggcgcgagagccgatccccctgtgaccccgcatactcttacatgcactctcgcaggcagccagccgaaaaatcgcggtggggggccaatttttgcgcttcgattcgaacgttaatttttgcgggtctttgcaaacttgacttgcgggcgcagcatgcgtcagccgtcgcgtgcaagcgccggggcgctggaccgcgtgagcaaggccgcgtgcggcgctggccgcgtgcaatgccccgggcagcggcggcgtcagcgtcgagccccaggatatcacggcgtttaccttcgagcgccgtcgaaatggccacgcgctcaacgacggggagaaggaaggcgaaaccgcgggcccaacgtggcgggcccatgtggcatgcgccccactggcctcagcccggcgcgaggtcggccacgtacgcacggcaccgcagaaaggatactttttgggccccgcgacaacagcagcagtcagtgaccggggcaagccacgatgaaggaagggagggacgaacgaactgtctgaagctctctgtattctcggcaggttatctgcacgcgcgcgtactcttctgctggggctcggctcgtttcctgctcgtcgcgcggcgcagagcttggacgagggtgacgggagccgagcgggcgagcgagctagctagcggcatgctgcgtggcgcgcgacgtcggtcccggattcctgcctgcctcccccgctacgaccagctagctagcgcacccaaacgaatcaaacgagccctttgttacttataaacttgcttataaacctgcgcaccgaggcgggggggatcataataccactaccgactgcaatgcacgcgcttccggtgacggcgaagacgcagtcggagcactctattgttccacacacacccactcgctcgcgccggggcggccgcgacttccacgatcgcagcgccgcgcgagcgcctcttcttgttgttgttgttgttgttgtagtagtagcagttccacgtattgtactgctcggcagcctccccgaggcgcgggggcggtcccatctcgcgatgcagtccttctcttcgttccacacgagatccgcgggcgttcccggcgcactcgctgccgagaaatccctaactagcttggcgtgcctcccttcccgcgtggcgccccctaggtggccaggaagtccggcatggtgaagacgctgtcctcgccggcgtcgttctccgggttcttgatccgcgtactcacttggatgtactcggccgtcacggtctcgtagctgctcagccgccgcgtcagctcgcagaaacagcagtcgcagccgggcttgtgcgtctccgcgtcttcagccgacgcgatctccttcgagttgtcgaacacgcgctccatgagcttggcgcgccagtcctggtagatcttgaggcgcagctggtgcgccaccacgcgcgcctcggggctcatgctcagcgcctgggcgttcacctgcccgtggaagtcctccatgatgttgaggtactgctcgtgcagcgtctgcaaactcgagagcagctggtcctcctccggggacagcgactccttcatgcccacgaggaagtcgcgcacgttcttggcgatctccatccctgcgtcctctccctgtgtcactccctgtgctctgcgtgcaccgcgcgcgctctgctgctcggctcgatgctccctgtctggctggactagcagcgcgagatcagtcggacccggctaccagaagcgcttgcttgtctgtctgtgtcgtggccagcaagatggcgaatgggactggcccggcgctcgtccgagccgcgccgctgctgcctgctgctgctgcgtggagtgccgcacaccactttttttccttccaattttgggggatgcgcccgcagtaacgcgaatatcacaacaggaaagatgagcgagcgcgcggattggtcaaaactgctcaaaaagttgacgctagcagagccaactggcaactggagggaccgcctgatacagacagagcctcgaccagcccggcccggctcgagcagcagcagcgagcgagcatattgcttgttgttcttgtccgcactatggtgaaaatcctgccaatattcgctgaggctgaggcgcgctgcagccgcgcggtgagtaacgggcactcgtgacccgatagtcacaccagcctgcgctggccgtgcagcggcgttcaatccacctcggcatcggtttgggagcactttttggcgccgaaaggttttcctttggtgaatttcgagctatccagaaaaaaggcgctaggtctgggctgtgccgctagaaacgtccgctaagcttcgcccgcagcacacccgcttgatgccttcggccgcagcgtcttgcgggcggaatgcacctcgcaaccactgcggtggacaccttgcaagcgctgggcgcgctccgtcgcaggcaacagccaccttggctttatgttcgacgcgcggccaactgcgctgccgcagtctctgccttggttgtttttttgctggcacgatgtcggcgggcctgcctcaccgagctgagccgagctggctatgcttccagggcggttgccggcggccggagcagtgcgggtcggcgcgaaaccctcgcggcggcaagcttcaagcgctttggcggggccgcctcatgctgccctcgcctcggtctcgtgcagagaccgccgtgggatactggcgacggcgaccgatacagctgcggcgcggaccttctgccgggcgcggcgagttatacgtcctggcgtgcgattgccaaaacgggcgtgggttcggatcgctgtgcgccaagaagctttacagtcatcgcgcggctcgtactgccggcccgccgcacgctatgatagtccaccgacgtcggttaaccaaggatattgcgcgcgtgtcctgcaaagtgctgccgctgcgcccgacacgccggcaagcgaaacgctgccggtggcgccgccgccgacacaccggcctgagttggaatatcaggccgccggttgaagagtaaactccgcgcacgttcgtgggctcttcctgccctgctgcaggagcaggcattggactgctcacattgacgccgctgcactggggctgggccggacccccctgctctgcgtgcagcgccactggagggaccgagcgcagagcccgcgcgccgcgcagagcatggcgggggctccgaaggtgctggaggacactcgcgtcggtccaaggctcgggcggcgctcccagatggcgacagtcctcagctgcggagcttcgcggcgatccatagagcttcggacaccatcgagcacgacgggtatcatcatcagctcgtacctgcctgccagtctgcatcgcctcctgccttccttccatccagcggcctccggagcggacgttgcggcgagctagctgcagccaccgtggaggccgccgcctcggcatctgatcgccgatcaacaagatggacgccccgctggtgtccgcgtcgcgcccgctgctgcaaagcacggctttcccgagggcagagaaacgagaagtgtctgtgtctctgtacccgtggtgtgcgccacaccgtccggggccgctagccgggcccacttcaagtgcaaccgtcccacttctcgcagcgagatccttttggggcaacggcaatggcagcatcacgtcacgtcacgcagagcagcagcagcagtgcaagaatgcagcgcgagcgagcgagtggccatgctcagcaaaaaagcagcgtttggttgcgcttccttccttcctgcacgcagcggtgccgaaaaatggcgcgggcgccctcgcgcgcccccgctctgcccgcatttcgctagtagcggaagggcaacctcaaccgttgaggtcagcggcatagagcgcctggaatcagaagcattgagcaatccccgcgctggatacacactccgtcgacgaagtcgaagccgcccggtcccacccgccttcgcctcgcccgcgatcagcagcggcttggtgttacccgcagtctgcaagcagcaagcagcgctcgccacttcacaggaagcggtgatcgcgctgcgcccgcgagtcgccgcgtcatctcgccgcgtcatctcgccgcgtcatctcgctgctcgcagtgggatctcaggcgaaaccgccgtggcgcctctgatttcgtcgggactgtagacgggcgcctgtatcaaggataagatcgctggccgccgctggccttgaaggcaatgccattgccattgccttcaaggctggtcctcgcgaacgcgaacgcgaacgcgaacgcgagtcgagtcgaagcctgagcggggcgtcgagaggcagcgcgcagcagcgggtggttccatgcaagctggcgggctggctactgtatgctggtgcggcaacttgcatctgggtggccccgatgcttgtcgggacgaggtctgcattcgtatacagcgaggagctctcgtaacccccaaatttgctaatatgccgtcggtaggcttctatatgcttttgggtaggttgcactgcgtcaacgtgcttgctgcgatgcgatggcatgatgcccgacgtcttcatgcacgaccgcgcgcaatggctcgatacttgcatggggtcgcgctgctccagcggagaatgcggaagccacgaagcggccagatgctgctggatgccggaaattcgtggcgtgtgcgacacactacccatctggcgcccgggcgcggcgctgactatcaatcactatggggccgcactcgcgttgaaggcacgggagctgctgcgatgccgggctcgaatgaatcgaaaacattccttttttagcagcgctggatcgtcacctcctgcgtccaggcccgatttagattcagccgccagacacggacacagcaatggagccgccgccgccgtccagcacgtcgtcccgcggctcgcggcccccgcggcgcgcgcagcgcctgctgccagcgctcacacccgcgccgcccagctccgcctcgaccgccgcggcgccgcacaagctcgagccgcagcccacggacgacagccggcccgccgcgcccgcgggcaagaagccgtcctcctcgctcgcgcacatcttcttcaaccggcggccgctggacctgatccgccgcaccaccagctcgctgctggccagcagcaatagcggctccgcgcctgcgggcgtggtcgcgacgccgcccgccgtcgaggagcgcaagttctggcagccgcaccagccgctgggcgacaagggcggccgccgccgcctgcagcagctgcagctcaaggagaaggacaggagcaaggacgaccacaaaccgccgcagcacccgcagcgcaggctgcgcctcagcggcgacgttgacgacgccgagacggagcgcaggaagaggcacgagctcgagccgcgcgcaaacagacaggaaaccgagatcaggaggacccccgcgccgtgcccgcccagcggcaagcagttcctgctggacgcggacaaggcggcggagctcacggccctggagcgcgcggagatcctgcagtacgacgaggtccgcttcgtctcgacgcgggctatcaagcgcagtcgccgcaatggcaagatccagaacgaccttccgatccacggagatgatgcagcggcgcacaacgccgcccaggagaccggtgagctgccagcggagctgtgcaacgacggctacgacgacgagcacggagactacttggtcttggtgggggatcacctggcctttcgcttcgaggtgctcagtgctctcggccacggctccttcggccaggtcgtctgctgcctggaccaccgcacgcgcaagcaggtcgccgtcaagatcatccgcagtcggcgcaagtaccgcgatcaggcgctagtcgaggtgcagcttctggcccagcttcagcgggcagctgcagcttgtagcgagagcccgcacgtcgtgcgcatggaggagtacttcttgttccgcgaccacgtgtgcatcgccttcgaggtgctgggcacgaacctgtacgacttcctcaagctgcgctacttccacgggctccccatgagcagtatccgcacagtgggcaagcagctcgcgcaggccctggcgttcctcgagcagcagcacgtcgtccattgcgacctgaagccggaaaatgtgctgctcgacgcgtctgcgctggctggagacgcgcggaataccggcattgtggacaacgtgacgctcatcgactttggcagcagttgtctcgaaggagcgcccatgttcacgtacatccagagccgcttctaccgcagcccggaagtgctgctcggccacacgtactcgggtgcgatcgacatgtggagttttgcctgtatcctcgtcgagctgtacacgggccacccgatctttgccggcgagaacgaaagtgagcagttcgcctgcattatggaggtgctgggcgcccctccgaccgaaatggtgctcaaaagcaagcgccgcctgaatttctttgacgaagtggtgaaccccgctgacgcgcagactgtcgagtacgtgcccaagccgttcgtgaactcccgtggacgccgacggacttctgggtctcgaagtttgatcagcgccgtcaagtccgatgacgctgaatttttggagtttttggccaagtgctttgtgtgggacccgagccagcgcctcacgcccgagaaggcccttgaggagccttggatgcgtcaccgtcagcaagaactcgtcgtcaaccctgtagaatatgagctctaagtaagttaaagtaacccatgtatgaatgaataagtgaattacccgaacactcagcgtgttatgcatcatgttacgcgaccgggaccggaactccgggtggagctgctggcattttcacgcctacagcagcgggtgacgacgatgagcccgctgctggggcagcgtagtcgtcgacactccaagtgtgcacagtcttgtcccatgagccggttgcgagcatggtgtcgaactccttgtcgtcggatgaagacgccgtcgacgcaagctggaaccagtccagcgcgcgaacgtagtcgcggtgaggcgtcgccttctcctgaccgaccagcagttcgcgggtgccgctacccgcagttcggtcagacgagaagctgtcagtagtcacgaaggacttgccgtcgtcccctcccgtggcgagaaggtcgtcgtggtaaggcgagtacttgacgacgtgcaccgccgccgcgtgagtgtcacgtcgagccaacggcgtgtgcggcgagcgcacgtcaaaggtgcagaccgtaccgttctccaaacccacggaaaacaccgtagcctgcttcgggtgccaatccacggacagcgcaggcaacaacgttgacaccgccaacgccgcactgtgaggacgccgagaatcccacacctgcaccgtggcgtcctgcgaagccgagcaaagcagatgagcgtgcatcgggttcatggccacgccccagatcaagtccgtgtgtcctgcagacatcaaagacaccgtcagccacctcctcctcagcccgaaatccagcttcgccaacccaccatcaaacgtagcaagacccttgttcaccgcgttaatatcccacaacttcaccctgtaacacagcaatatagcaccagtcaacaaacctccgtaccaactaccagcagagccaagagctcaattaacgcacgtgaggtcccagctgcacgtcgccagctgcgtcttctcgatcttggaggcgctgacgcccgtgaccacgtcgtcgtgtccccatcccgtcaccaccgcgtcctcctccgccgtcgagtcgttgccgccgcctgccgctccgatggggatgaaggcgaatgccacgtccgtcgacagcttggccagccgcacgtcgccgtcatcgcagcccagcgccagcacgtctccgtccgcgccgcaccaggcgagcgcccccatgcccgtctccagctgcagctcgcacaggcgctcgctcgtggcggcgtccagcagcgccacgccgccgccccagacgttgccctcgagctgcgactgcgccacggccagcagcggcagctccggctcctcggcgccgccattttcctcgtcggagaagagcgtgttcggcagcgagcacgcggccacggcgtccacctgcgcgggcgaggagaaggccgggtgcgaggcgtgcgaggcagccatgtcgctcacgtgatctatccggtggctcgcaaatgacgcgggaacgactttgacaggatacgtggtgtggcgcacaccataccaaaggcaagttgaagttgtcttttgacgccaccgttgggtgaggctgcagccttttgtgaagcgctttcttctcccttctctcctcgtgtctctccatgggacctgcggcggctttggcttttccagttgtggggactgttctgcaagcggcgctcgtcccaagcccaaggaggagaaaagctttggccaagcctcaaaagacttggacactttgcaacgcgccgactgacgaccaagccaacagaacctctaacggcgtatcaagatggtgcgaatgcccacgagcatggccaagaacaaggagcccaaggagcacggagccaaggaggcggcctccgaggccgtggacgagatgctgtcggaggcggagcagatgcgtcgccgcaacgacctcggcgaccccggccgtcgcacgctggagcagctccaggaagacgcccgcaacctcggcgagtacgcgcgcggcaagatggagcacatgaacgaggtgatgcgcgaggcagccgcttcagcgcgcgagtccactggacttccgaactctgcccccgtcccgacggacgccgtcagtgacaccgtgatggattcactcaagacagcgagcgagaagctcagtgccgagatcagcgagctcagcgagcgagccgagagcgtgaaggcgcgcgtccaggagtcgatgatggctgccggcggcaaggcgaaggacacgtggcaccagagcgccgaggccgccaagaacgtcggtgagcgcgagtactgcctgccgctgcccacgaaccgcatctgtgctcggcacgtggcgttcttcggcatcccgctgctcgccttgctgctactgataatgatgcgtcgtcgctacccgaagaaatggaaggccggcgtgaacaagatgaagcagccgcgcatgatgctttcgcgcgaggtgccgtccagcgagaagctgaagtcgcaactggagggcgccgccggcaagctcgaggagaagatcgagtacggcaagcagcgaggcagcagcgccatggaccaagcgcgcagcaagtacgggcagccagagaagaagccggagatcaagaaagaccagtaacccgctgtagctgccgttgaactgcatcgcgtgggttgacaagcaagttgtctccctcagcgatgcgcctcctttgatatcttcatacaattcgctttggcaacacaacaagttgggaaatgaaaacaacgtggtattgcgttggtctgtgtgtgtttaagcaactttttggcgcttggtggcttctgcaccagcggcagcgtcgccctcgcgctttatagccgccgggtcctctgcgcctggtgctcctgcagctgctacagcgttgttgttgttgttctccagcttctctgcgatctcgggcgcgtgcttcttcatcaactggatcagaatggagtccacgcgcgccgagttctcgcgctgcttctccatcttttcgtacttctgcttgagcttgagctgcagctctgctcgcacgcacacaaagatcagcatcagtacagccactccagaacgtccaacaattggcctccgacttacgctccgaggggatgacgggctccttcttgtccttggagctaaagtcccacgcgtagccctccgtggggctgaagcgcacgcccgccgccagcccgtgaaaggccttgttcaccctgtagctgcattttttctacaataatcacacacacacaatgcacagcaccatgagtacactagataggcacttgcaagccctacatagcacagatgcagcagctcgtacgaggcgcgaggtgagcatcgcgtggatgttgggcgcctggtacacggtgccgtccagcacgtagtagatggccagcggctccacctgcgtgcggccgctgcgccgctgcttgcggatgatgaagagctgctgcggcagctgcttggccgcgttgggcagcagctcgtactcgacgccgcgcaggttcttgagctggtcgaggccgagccgctgcatcttgaggcgctcgttgttgcacgagcggtcgtagaacggcgacagcgcgaagtagtgcagcacggtctgcgcgttcagcgggaaggactgcagccacaccgtgtcgcggaaggacgcgttgtagtcgtccacatgcgccgacacctccatgctgcgcagccctcggagcactgtacagtaggagtaaaattcaatagtgaagcggaagtggtacactgtaccgatttaaagaactgggtacattgtaccactggctcaaaaaggcattaatatggaggcgctgcgcgtgacctacaagacgccgctggacggcgagctacgcgcagcgatgacggcgcagctggtcaagtatttgctcttcatgcgcggtcagatcccgtggtgcgttgcgcgtttttaaaattagtagaaaagcgaggttatggcgtaatttcgtgggaattagtcgctgaaagtgttggaattgctgtggcgcagtctttacgacgagctgctgcgggttgtggagagctaccaacttcagcagcggcaggggcaagtggggggaaacaggagaaggaggtgagatctaatttggtgtggtgacgagaagatttagagctgaggtttacgtttttattgggcacaggttgctcatgggcatcaagaaggcggtcaagtgcgcgggggcggccgagcccttgttctatgagcagttggacgcaatcttctcgctgaaagtgcagcgaggtagaggttattgtgtttggggggctagatcggaatgctgttagtaaacgaggtgttggtgttcacgttgcacctttgcagttgcgctggtgtttggcgcctcgatgatgagttcgcgggaggctgttgtcgtggattttgacgaggttgacgcagaggtaaacgaccaggacttcttgtcgcagtcgagcacagcttcgccgcagactgatgcagaagatgcttcgatggaggactcctcgcagacgttgatcccgctgtcgccgccaatgggaagggagaagttgatgcgcttgtgcgcgcagaaactcatacatgcactacacacacactccatgggggctttttcgaggtaaggatatgccgtggtgccagctaaaatgcatcttctaatggcgaatgttcgtggtggacccttcagcgccctccctacgaccaagttacacatcgctgtgttggcagagcggcagtccactcgcataccaggattcctcccaaagcagcatttcaagcttcgacttccaaaggataagggtggggtgcgcacacactacgtgactatcagcagtgggggtgttggcagcaacaaatcgtcgcagcaagatactcggccgaccaaaagcgatgccttctgcacaatggagaacgaatcgtcagaggcgaatggtggcgcacctttagagttactatcctcagcacaacaggcggcagtcgacaccaccgacgcttgtatggtgtggtatgtgctggaaaagcccattccaggcttttcggggactattgacatactcgaagggcaatgatagcatcacccatgttctcggctggcaggctcagatacagcgactttgccaggtgacttgaagacgggcaagtatccaaaaatattccccaggacgcagcgatggatagtaggaacaagtgctcctacttatcctgtgctaatgaggacgacgtggagttgtgtgaagagcgtcgatgacacttgcgatcttcgtgtgtctgaagcagtcgacccaaatgcagcagctcccctcgccgacggcgttcgcctccctggaagagcgaatcgcgcatctgaactggaggaaaatctgcaacgagcggcagattcaaggcacgcttcgcttcagcaagcaactccaggaaagagacgagttcatccgagctgcgaaaagtgacaccaaggcccaccgcgagcgcatgcagcaagtgatcaaggacgagttcatcaagccgcttcctgtaacgacccaattttacgaggagctcacggcactgcagcgtgaagacgagcaaaaagcgcagaatgtggctgagaagcacataacgcagcttcacaatatccaggcgaagcttgacgcacgcgaggctcaattgatgcgcaagaaagagttcgaacggaagaaaaaggagctctttgccggtagctagagtagtcaagcaggttttcttaggaattacacaggcgcgtattaacggaatgtaaggagctcgatgtcgaagatcaggttagtgttgggaggcacgagtcccgggaatcctttccgcccgtacgctttatctgcaggcacgaacagcttggcacgctccttcatgcacagccgctcaactccttcatccaggccagggatcacttgttcagcgccgagtttgaacttgaagggcttctctcggtcacgagaggagtcgaatttcttgccgtcttgaagctacgagttggaagtatcatgcaataacaaggagaagacgtaagtcgtggcagatgaacagcaagacgtcgaagctcagacctacatatcctgtgtagtggattaccacagtctgacccttcttcgggtagttgagaccgtcacctgccacgaatacttcaacttggatctcgccgtgacgctgcagacaacagccagcgttagcgaacgcggctgaagggatcgtttacacatgaacataccacgttggagatcacaaagtccttgggttccatcatgagtcttgacaaaaagctgtcaggagcaagagtgagcaaagcaaatatgccagctttccccaaaataaaacaacggcatctgtgcagcatcgcagaaagtaggagactgcattcacttacaacctccaatataccagctatcatacttcttctccaaaagagcagcatccagctcagcacaacagcattcctcagtcagccaccccttcactccgggtgctcgactttcttcctgttgcgagggctcaagttcttcttcgccggcttggtcggaggcgacgccttggccttcggctcggcagcgccgctgtccttgcctcccgggtagagcaggatgagcgacacctgaatcgagcccatggtgagcgcgaacaggttggggcagatgaccagcgggtcgccgagcatgatgccgtagatcatccaaatcgtgccggccacgacgttcatggctgacatgcccagaggcaggcaggacgcgtccttacggcgcaagatgcttttgacctgcagcaacggcgacgcggccgtgaacaccgacaggatgttggccgggatgcccgtgagcatctgcgtctcctcgggcgagcgcgtgacgacctggtgcgccagcagcaggatcaccagcatggccgacgtcagcatcctcgtggcctgcgtcctgtcgcgcgcgtacttgtagaacacgagcacgtagtacgagcccagcacggcgcccagcagcgaggtcccgcccaccacggggttgctcgtcgtccagccatacagcgtgtagatgacgctctgcacgaagtagaagaagaacggcgcgaacgagaactgcagcgtgctgcgcgcgcggcggatggtggcgacggtaggcctgcatcaggtaggaggggacaggaattagtgctgggcggagacaagggagaacggtgggcgaacgtaccacggggatatggcgaatacgatggacgagcccacggccacgacgggcacggacttggccgccaggaagtacgtcatgtaggccgcattggccagcgactgcatcgacatggtggcggcggttgttgccttttacgctgcgtagctcctcgcagtttggccgtttcagaagggacaacgtttcggaactaagcggatgagatccctttaaacattaggcgagtttggtatctagcatacttgaagttgtctgatccatacagaagctcagtataatgtactgctagacaagataccctgttgaattcgttaattctgaggttaaaccgttccacgtggcaacaagcacatggctacacccaagttgaagtgcattgtcaagactgctgcgcactgcgcagtgcgcagaggaagcaccgtgaacatactaactaacttcttatttaaccttcttatttaaccggatgaatgaatgtcaactaatactgtgggccaaaatgtgtcatgaccttgtcgatgaggtctgactgcaggtggaggctaagccccacgtaccatgaccgagcgagtgcttgcaaggccaagagctcttctgtcggcgtccactccccccactccagttctgcgtcgggtgagatctcttctccattcttgttcaacttccggaagtaccgattcatgagccgtgggaggtcgcgcttccagtcgttcacgaacagcacgggcgcgttcaagcggcggaggaccccgtggacgtcttcaggaacgcagcgccacgagtccgggtaagctgggtggaagaacactccagggggttggcactgtgcgggtagctcctccacaatagggatcgatccagaagacaaggcctcccagatccggtactgctccgggttcttgcccagcgggcagatagtaaacaccgactgctggagtgttgacacgtaggcggcaggtgccgcagacaaataccagcgccacgccgtccccagccgcttatccacggcttgcaggaccttgaagagcatatcgttgtgctcaacaacacagcgtcgcgagtttgctcgcgttgcgcgctccaggtctgtgcatacttgcagagcagccatcatggcctgcacccgtgtgggcttctccacagtccagctaaccatgaggttaagcaagaatttgcggccgataccagtagcaagaggtgggggtggattcaggtggtgcgcgttcagggggaagccatgctcgaaactcggccccaacgggagggacgcaaatcgcttgccgtccacgagagcgcagtcgccgtacggtatcaacccaaacttgatagctgcgttatccaagaagcgctcgggtttcggattgttgcagttctctctcgccagcgtgaggaaacccacacgaggctccaccgggagaacgtccctctcgaacacgcggttaacactatcaagcgactgcgcagcaaccaagaggttactcttggccggcaaactgcgcagctcgtgagcgttgtggatcatgcggaactccaaatccagcgtgtcaactgtgcgagtccagggtttaccagggggtgactccactcgcggatcgaagtacgatcctaggagatcatgccacaggtacgggaacagcgtgatcttgtccacagggcgtgccttcacaaaccccgatgttacaaccgtagctgcgtctcgatcgccgtcaccagaagagctggaagccgtccacgacgtaggtagtggttccacgatgggtatcatttgatccggattcaactcaagcacgtggtcgtagtcgaaggggaccacgtgcacgacagtccgctgagcttttgcgtcgtctcgcggcttcttccattctgcatgcctctggacaactgcatccagcgtctggaactccgtgtagtcagccatagcgtcgcggaacttgcacgtgtccatgatattggccggcagtgtgtgtgtagccgcgaacaaccgcttccctgtgttctccagcgagtaccaatcgtacggttcctccacgaacgacccagtgcgcagcttgagcacaatcgtcgtggtgatgacattcaccagagccactagcagcgttgcgatcgccgagcgtcgcgcgagttgcctccatctgaacaagtgaacgccgtcgttgtcgtcgttgtcgtcgtcttcgtcgtcttcagctcctgcacgcgctggcttggcatccagttgagctgcttccttgacactttccaccgtcgcagtggagtggcgtctggtgctgagctcgggcacgtcgtccgacgtccgtcgatccctggcagtggatgcgcagtcacttgcgtcgtctgagtcttgctgtagagcccgatactggcgaccgcgtcctgacctggctgctcgctcgtggcgatacgcccaccaaacgagcaggccgatgacttgtagcacgacgcccgtgccccagagccacaacagcagcgccgctgatggatacatgtgcagcgcgttgggcatggctgctgcggggcctggcagcggagaggtcgagtgctctaatgcatggaagaggtccagacaggaatggtcgttgcacccgcgcaccatactcggagcaagtgtgcacacgtcacaggtagttccgagcgaaattcagccaatgggagatgggtacatcggttgaaatgccactgtctttgcggcaccgacactcgaggccaggccggccgttgcggacggttgcaatgcttcaatgccgccaagcctgcttgctatgcgtgtacatctcggagaaaatggattaaacgtggtggtgccagtgtacgtagctccccaatcgttgaggcattcatgatcaagactctttgtgcattatcaataccaactgcgtctccggcggtgctggtaggcggagagtctccgcctaccagcacccccgcctaccagcacccccgcctacttgaagaagcccttgcgcttgtagcccttgtgcttgtagtggccgtatccatggccgtagtggccatgtccatagccgtagccgtggccgtaaccataaccatggtggcgatgtctgccgaagccgagcagtccgccgagccccttgcgcttgtagcccttgtgcttgtagtggccatagtgatggccgtggtggtggtggtgagcatggtgcacacccggctgcaccacgtagactggctgcgcggggtacgccacgggcgccggtgcagcgtacgctggagggggagggtacgcgtgcggcgccggcgccgggtaggcatagcccggagcgtggtgagcagcaggaggcggcggcgggtacgcatgctgtggtggataggccggctgcgcagcgggcggagggtatgcttgaggagggtatgctggctgcgcggcaggaggagggtgctggtacggagcaggctgaggcgcaggcgcggctgcaggcggctgctgggcagggtacggctgctgctgctgcgcggggtactgctggggagggtatccctgctgcggaggtggcgcttggcccgcaggcgggtactgctgctggttgtacatcgacttgagctgctgttgctgcttgcgccgtgtccgcttgctggggctgggaagaattccgatgtgctgctgcgatggacgacggcaaatcaaaatcgattaaatgccgactcagacggctaatttctgattctgtcgatggactctgccggtggacattgttgtcctcctgcctgtctccacgagggaacagccgtttctttgctgggtccattagcgcttacatttgagttggcgatcggattacagtagcttataagctctagacccgatcgactggaggtgctgacggggtcaggaggctcgagctgtcgctctcatcggaagacggcgcagatggagctgcggtcgccaaggttgggtacgaacgcgctgtcggggtgtaccgctgtgcattcgctggatcctgaagcgtcgatgacgaagtccgtgcaaattgcgagtagtctggcgagtatggcggcggcggtggggaaggaggagggccgtagcaaaacggaggcggcacgtagcgccaatgctgcgtccgtgctcctggagaccgtgacaactctgcttgatggtggtggggatgaagcagattgccagcgagtctcggaaactcgcgaaggtctggaatgcggattccgaagtcggagtggtggcgacggtgtccgtctccgtagatgcggttcatggcgatcgtcggtgtattgcagtcgcttgtgcgcctcggagcttttagcaatctgtcggtcccgcgcttcgatagtcgacctagtgctgggcccaacccgtgcgacaccgccgatggtttgagaggctgctgtccaggacaggataaactttcatcacaagtgacatgcagagccccgttctattgtgcaggctttgccgatgctgcagagagatcgactggaaaacgtcgtggccaaatactatagcgacgacgaggattaacagtaaactaacgggtgcaatgaattatattttttcttagcaatgattgaatgtcgttgttgactgcgaggattaccatccgtggtggtggtggtggtgaaagtgcggtgacgggggtggcgagcactcgtagtacacgggaggcggcacctcgtagacaaccgggggcggtgcggcgtagactactggaggtggcggaggaacctcgtacacgattggaggcggtgggggcactgcgtagatgaccggcgcggggggcggagggccgtagtactcaggcagcggaggaggagggcaccgtcgcggagatccgggccagggaaacattgtcttgacttggtaatctcgaagtgaacgcttgtgtttgaagtggcaagttgagttgtgggctcttcaaaaacttcacggcgaaaagcaaggccggaacttctgacgaagatcattgtgcacgtgggacatgcacacgcggatatcaagtaaaaatcgaggcaacgagcgtaggtaaacagtgtcctggctcaagcagcaatatgtagtcgcgcgttgaatgtacaagctcggtgggtgaacggtgagtgaactggaacaggtggaatgaataccgataactactgtatttgctagctgagcgtgtattgtgggcaggacctgaaagaagcgcgaacttccgcgtgaaatgtcgatacgtacgatgtaggtgtttgcatgcgctgcgtatacgtgtggtctcgcgtaaatgaactaaaagagctcttagcggtgaagaaatctaacactttcttcatggatacgtacaaacttctaaatagcaattgaggaacgggatatattttcttacggcgctcgataacatactgtatctgcttgagcgctacggtatcggtaaccttaccatccaggaggtgggtggtgatggtggtgtggcggcggcgggccttcgtagaagaccggagggggaggtggcccatggtggtgatggtggtgtggaggcgagaacggcctcggaggtggcggtggaggcgcatacactggcggagggcattccgggccgggcccgtatccgtacggcggcggtcccggagtgtcttccgcgcagcgatcctgggtatcctcggtacatggtcgtttgctgctgctgctgttgctgctacctggaaagtcttccgttgcttggcgcggcaaatagcgttgtgagcctggacgcgatccggacgcaccccctcacatccccgcgccagcgcgcgccgccaccacagcaggagagttttggagcgggcatgttcatgcgacgtgcaagccagtctcacgttctcgtgacaatccacaacgacacacgcagacctacctgatctacaggccgtgacgccagcgcacttcaactaggtcaggacctggcctaggtgaagtgcgttgtcacctgactcaggtgagcgtctacagtactgtagtacactgtaacgcgtgctgttgcaataagagggcacataattcagctagcctcgcgttgtgcttcgcatcgatacatgtagtcgtcggtgcattctatgttgttttgtgcgcgctactaaagtaaagtatcgcttgccgcaactaccaaaatgacactattattgtactacctacgccggtaaagcatgaaatcgacacgatcgggtggaacatacattgtatatttcatggcggcaaagcggtgctcgaggtcgccctccagctcaacgcgcccgccgttttcggttcatgaacacgacctgcttctgggcgatatcgcgacttcaccagccgcgcggaggaagaggtacgcgctggtccggcggaggtccgtggtggtggtgcggcgggggtccgcggtgctctggcggcggcgggctgtggtggtgcggtgggctgtgcgggcggccaaacatgttgctttccgggggcttgactgttgcttggtcggtaaattgaggagtgggcgatggccatcaccgctgcagcgagcgaacactggcatggcaatcctgccatcgtcaagtgatgaacacatccaactcttgcgaagagttaacctacgatttagggcggtgctgactggcgaatagtcattttggcgaatcatatcgccgcgcgtttacaggacagctcaacagctgggctagcgtctcacaaacgttttacaccagaatccaaccaggagatctgtgcgctgtgcaagcgaaaacatgcactggaaatcagagcacagattatgcccctccgtcgaggacaagacagcagtagcaagttttggctgccggcgacaatatttgtgctgtacatgcatcgacgctggattctgcgcttgagtcgcacagctcctactggccagtattttgtagtggcgacttcaacccgagcacaactgcaccactgtacaatactgtacaatacaatggcgacttcaacacctgcaccactgtacaatactgtgcatttattcagtccaaacaagcgaacgtggagattgtagtaaagcatcccactgttagtcgatccgattcgaaaaaaaaacaaatccaggtacagtaattgctggtgtattcacaggtcgaagacctgccggcaaaaaacttgtaactttccaaaaccgggtaccaaaccgggtctctctttcttaattgtaatgtttaagctaatatctaccggaatcgggtacccgtcgataaatgctaagatttatgcacattatttaccaaaggttgatactaatcgttcattctttaccaaaacctgcgttcaaacacttatggacgctccagtacactatgagagcgtcatggcctcgctgaaggcgtatcaatttgcgccataatcgaccaagcttagctgaagatgaccaacatgacttatctagttgcaggctgcattttttacatgtcaatttgctcaatactcaatcacttagccgaagatgcccaacctcgtgtctctcgccaaaccaaccgagcatcgttcgtttgaattaggctttctttacctgcgttgaagcgcccactcccaaggacttggcacattaacgtatttctcattccgcaatttaccctcaagttaaaagatcaagatcagcgcaccatgcatctctccttcgttccgctagctctcgtctgatcgttagcacacagcatagtactaaatgagcacagtataccttacctgcaaactgaatgaaatagctctctcgttgctggcgtcaacgcagccattggacgctggccagagtgttattcccgggcagatgctgcggctgcgaagcaggcgcagtagatgcccacactagaatcaactagagagttcggctggtactgctcttctaaaatccttaaaaggattataaacaacaaaactttgggatttactcaattgttatccgttatcatcgtccatgaaactattcgccgacctgtgtaccctggagacgaatttgacgtctccacaaattgcgtcgagcgcaaatgaagcgtaccatttttttggttcaattcccaatcaccactcatgctgagcgttcacgcccgcactctcaagctctgcgtcagcgcgcccaagccgtggacagcagagccagcggaagagactgagtgtttaataccacccaagttgattgtacgtgcaccttacgcattgtttgttactgacgataagtgagtgtagccatgtatttagcactcaaatgtgatggttttggtcggtaatgcaaacacgacgcaaacgacatatttggcacataaattgcgatttgtgacagcgtttgtgttagttttggaagagttccattcaaacgcgtttgcaaatagcactaactgtaagtaaatgtgttgtgaaaaacatgtttgcggagtacactacgctcgatgcatgtacagtacagcacatactgtgtgcatttggaactgttgccggcagccaaaacttgctgctgtcatgtcctcgacggaggggcataatctgtgctctgatttccagtgcatgtttccgcttgcacagcgcacagatctcctggttggattctggtgtaaaacgtttgtgagacgctagcccatgtcctgtaaacgcgcggcgatatgattcgccaaaatgactattcgccagaggttaactcttcgcaagagttggatgtgttcatcacttgacgatggcaggattgccatgccagtgttcgctcgctgcagcggtgatggccatcgcccactcctcaatttaccgaccaagcaacagtcaagcccccggaaagcaacatgtttggccgcccgcacagcccaccgcaccaccacagcccgccgccgccagagcaccgcggacccccgccgcaccaccaccacggacctccgccggaccagcgcgtacctcttcctccgcgcggctggtgaagtcgcgatatcgcccagaagcaggtcgtgttcatgaaccgaaaacggcgggcgcgttgagctggagggcgacctcgagcaccgctttgccgccatgaaatatacaatgtatgttccacccgatcgtgtcgatttcatgctttaccggcgtaggtagtacaataatagtgtcattttggtagttgcggcaagcgatactttactttagtagcgcgcacaaaacaacatagaatgcaccgacgactacatgtatcgatgcgaagcacaacgcgaggctagctgaattatgtgccctcttattgcaacagcacgcgttacagtgtactacagtactgtagacgctcacctgagtcaggtgacaacgcacttcacctaggccaggtcctgacctagttgaagtgcgctggcgtcacggcctgtagatcaggtctatgagatcaggtctgcgtgtgtcgttgtggattgtcacgagaacgtgagactggcttgcacgtcccgctccaaaactctcctgctgtggtggcggcgcgcgctggcgcggggatgtgagggggtgcgtccggatcgcgtccaggctcacaacgctatttgccgcgccaagcaacggaagactttccaggtagcagcaacagcagcagcagcaaacgaccatgtaccgaggatacccaggatcgctgcgcggaagacactccgggaccgccgccgtacggatacgggcccggcccggaatgccctccgccagtgtatgcgcctccaccgccacctccgaggccgttctcgcctccacaccaccatcaccaccatgggccacctccccctccggtcttctacgaaggcccgccgccgccacaccaccatcaccacccacctcctggatggtaaggttaccgataccgtagcgctcaagcagatacagtatgttatcgagcgccgtaagaaaatatatcccgttcctcaattgctatttagaagtttgtacgtatccatgaagaaagtgttagatttcttcaccgctaagagctcttttagttcatttacgcgagaccacacgtatacgcagcgcatgcaaacacctacatcgtacgtatcgacatttcacgcggaagttcgcgcttctttcaggtcctgcccacaatacacgctcagctagcaaatacagtagttatcggtattcattccacctgttccagttcacccaccgttcacccaccgagcttgtacattcaacgcgcgactacatattgctgcttgagccagggcattggttacctacgcttcattgactcgatgtttcgtccgacaatttctgtctaagaaaaatttcatacgtattctgtcatttttcgttttttttagctgtcgtttccttcattttcaggaagcttctaccaatcagaagtccgctcgttttagctcacttttccattattgcaacgagccgcgatggaagcgccgctggctgtgggtactcgctgcgagttgctgtcctccgggccgagcggcagcttgcgcgccagcatcaagcgctacggtgagatcgtgtacatcggcgcggtcgaggggctgccaggcgacgggtggctcggcgtgcgcctggacaagccgctgggcaaaggcgacgggtcgttccaaggcaagcgctacttcgactgcaagccgctgcacggcgccatcgtgcggcccgagcgggtcaatacaagaggggagttcccgatcctgacgactcacgaggagagtctggcgcacgcgctggaggagcggcgcaaggagaagcagggggccaagagcgcgttccatggccacgctgaggagctctcgacgctgcagcgagagctaaccacggacgagctggcgacggccttctgggagaagttcacgcagcaggaagagcacgtgcgcaagcaggtggggctgttctgcgagcagaagaagcagccgctgccctgcgagccggccaaggaggtcaagctggacgcgctcgtgctcgagattaacgcgatgcgcgatgctgcagccacggctgcctcgctgtacttgtcgccgtatgatacgcgccagacccaattgattctgtccaagttgctagagctgattgactcgacgcgagcgactttcgcgcccaggaagaagttcacattccgagctcatgctgcgagaagagcaaaggccaagtcggcggagaagcaggaccagccagaacaggacggattgacggaacgtacaggcaaccagttgtcgccgtcgagcacgcagaaggccatggagttcgacgagctagtgcacgccaacaagcagaaccaagtgatcgtgatcgatagcagcagcttcgccgacgcggacgataagacgcgtcgcgacctgaacttctcacatctgaccaactgtgttgtgttggtgcgcgtggagacatcagcgattcggggcgacgcactgaagaactgtgtgttttacactggagcgatcttcggcagcttgtggctcgaggactgcgacggctgtgagtttttcgtggcgtgtcgccagcttcgcgtccacttgagcacgaccacagcgttccacctgcgtatcccgagccaccccattatcgaggattgccagcagatgcagttcggcccgtatcggttgcaattcgacggactaaagacgcagctcgagcgtctaggcgtgtcgaaggactcgggtctatgggccaaggtgaacgacttcaagtggcacaaagcgcagcagtctccgaactggtgcatccgcgacccgaagcagccgctaccgaaaatcccttccgagctggagaagctggtttcgtatgaatgaattcttcctagcgataagtggcatcgatcgatacggaacacttatttaacgggccactgctggatcaagacaaatgcacttgaaagtatataaacacagctggacgtctaccgcccctctatcgtctcgcctagcgccgcttcgccttcagtctagtcctgcttgctcttcttgctttttttcttcttggcatccttgtccttgtgtttgtgtttcttaggcttcacttcgggttcctccacggacggagccggctcctctgctactacttcatcctcggcgagcttgcgcttcttgctcttcttaaccttcttctccttcacctgttccaccgccacctccttgacgggctccaccacctcgggctcagccgccgagaggtcaaggtgtttggtcttcttgctcttctttaccttccccttctccaccgcctcttccttaacgggttccgccacgaccggctcacttgctgcgaggtccaggtgcttggtcttcttgctcttcttttccttcttttgcttcttctccttcggcgcttccacttccaccacctcgacggtctccgtctccggctcagctgctgacagatctaagtgcgtggccttcttcgccttcttaaccgtcgccttcttgacgccggcaccttcgaagcgcatggtggcctcaatggcaatcataccaccagcgacgtggacactgtcgcacacaacaatccgattagctcttggagcttcagtatccacagttgcagtccactcaccgcagcactttaacgtccacctcgtcctccacggagatggaggagccgtcctcgcccagcctgaaaacaacatcagcatttcaaagtcagcaccaataaccacctcaataataaccaactgcaatggcagcgtaccagcagtcctgggcgtagttgtgcacatatcccttgggcagctcggcctcagccacggagccgttgaagacgccggcgaagagcatgccgacgtggttgctgccgatcttgttgacgacgccgcgcagctgcatgccctccttggggcggaagaccagcgcgtcggccagcaccttgcagtggatgtggggcatctcgttcacgatgacgccgtggggctgcgccagctgcacgtcgctgaagctcagcaccacgccctgcagcggctgcgagtagcgcatgagctgcgccgtcaggtcctgctcgatgcccacgcgcggctccatggcgtggcacggcgccagactcacattgtgccgcaccttgcacagcacgaacgcgttcgacaccatctctacagccggcgacgatgccctccgtagctccgagtacactacggctcggtgtccctttgccaccaccaacaaacaggctaatgaccgcgccggccttcgcttccaatgaaaagcgccgagctatttacatccaatggcggcacttcaacgaatttcgcctttttcatccaatcgccggttctcagtggattacaccatttacagccaatcgcagcgcgtagttgccgtcggaggtcgagagccgctcgtcgagcagctccccacactaccggaacgcgaagcgatgaacgtcctgatgctgcgtcgatcggccgcggccgtggccgccaagcagactctgggtcgcgcggcggccggcagcgcgcgcggcatggccaacatcccagcgcccggcaagccggaccccaagcccacgtggggcgaggtggtcgagaagatgtcggacaccttcttcctctcggacgtgttccgcgccacctggctggcctgggagatccacgtggagcgcaaggtcaccatcaactacccgtacgagaagggcatgctcagcccgcgcttccgtggcgagcacgcgctgcgtcgctacccgagcggcgaggagcggtgagtactggagccgccgttctggtggtccggacacttcttggtcgaagaggcgcacgcgttctcatattctatatgtgatgttgtgtattgtgcactgcagttgcattgcctgcaagctctgcgaagcgatctgccccgcccaggccatcaccattgaggcggtacgtgagcggaatgctaaatggattggtctttggaagaggctgataattttctctctctaaatattgcaggagcctcgtgccgatggcgcgcgtcgtaccacgcgctacgacattgacatgaccaagtgcatctactgcggcttctgccaggaggcgtgccccgtggacgccatcgtcgagggcccgaacttcgagttcgccaccgagagccacgaggagctgctgtacgacaaggccaagctgctggccaacggcgacaagtgggagttcgagattgccaagaacctctcggtggagcagctgtaccgttaagcaagcaatgacacacagagaaggcgttcctgcgacgtagctttgccatcggatcctcgtttcgagcagcagctcagcgcgtggcttggtgtaagttgtagcgtcagccccgtggtggctgcttctcgtgaggtagacgagtgggatgcctttataacgaagaaaataagagcgaatgaaatggaagatgacgctcttcaacgtcctcgcagagacgcctccagaggcagcatccagcgtcgatggggacaaattcgggttcatcgagcaaagacccaagaacgatgcaagtgtgtttttacctgtacagaggatgcattgaagttactaactacagtatcgacaccagggctacacgtcttccggcggtgcgatcgtgaacttgatcttcttgatggtctgcccagcgaaccggtacttcttgtccggcgccttcgaagtgtccgtgtcgtagaagtagttcgtgcccaccgtctcctccagctgcccgtgcagtgcgtactctccaatgcgcagcatcggcgtggccgtgtcaatgccctagtcaaagcaataccataaaccgtcaccccttcagcaacaccaataggtagaatatcgcatcaacgctacgcacctcgagcgttgccgtgctatagtcgtcgaacagcgggtggttcttaaagtcgcagagctccagcaccaccagagcctcttcctcctcctcctcgctcttgtccccattgtgctcgccgtcttcttctactgctgctgctggtgctgtggactgtggagcaggcgccttctcctcttcgtcctggccattcacgtcgatctcagcgccaaactgggcatcattctccttcgtgtcttcgtccagctcttctctcaggcgcttgccagtcgtcgtaggcgagccgtcctccattattgccgactacagagtcgattccgttttagtgtcgtaattccctctacatagtgacgtgcgtagacttttgaggctttcggcggcgtccgtgaccagccaaaagtcaattaattggcagttgagtcgagttgagtcgccaccatgtccatggcgtacgtccccgtgggcatcgactcgaccatcgtggtctcgggcgtcggcgtggagctgaccagcgccgtgctcatgaacatgtaccgcacctacggccccatcgtccgcgtcggacacaacggaaccaactcggcgtatgtatcatccgcatttgtagctgttgggtcagtttggttgcaatgcagtttatacttacgcaatcgtgtgtgtgaacaggcacgtggtttttgagcagaagcgccatgcgctggaggccgtggcggcgacgaacggtgccgtggtgttcggcaagacgctcaaggtatcgctgcagcgaaggttcaagacgacggagccgtgccgcggcttcatcgccggaatctgccgctacggcgacctgtgcaagtacgtgcagtgtatttggtgttggtttgctttatctggtgctgactattggcgtcggctttgacagatactaccacgtgacagacaacgcggcgtttgcaccgccacagtctgcgcctcctgtcgttgcggcggctgcgccagagccgaagaaaaaggcaccgaagcctgcgaaggctgctaaacctgctaagcctgcgaagtctgttgagcctgctgggcctgtcgtagtgccgcctgagatccaagctatcccaagttcgcggctgtgccgtcatttctcgcgcggctcgtgtgcacagggctcggagtgcaagttcgctcacgtgttgggccttccgaagtcagaggaacctgcgaggaaggtcgccaagatttgtcagtttttccagagcggactgtgcactcgtggggatgactgcaagtacatccacgttggagcagccgcatcgaaggattctgcagctaaggctcctgccacgaagccttctccggcaaaggctacaaagcctacttcagccaaggcatcagcagcaaaggtttcagcggaaagcgatagcagtgacgatgaaagcgaaagcgcagcagaacagaacggggaggaccgcacgtgtgtcgagtgcgagaaacttggcgtggccgtgtggaagtgtgcgaagtgtgacaactcgctctactgcaacgactgtaactccgcggtgcaccgggctcgtgtgatggcgaaacacaagcgctccaagctcccgccggtgcccaagcttccgcgctgtggcgagtgcgagtctaaaagtgccagcgtgcgctgcgaacagtgtgaagttgcattatgtgcgtcctgtgacgcaagtgttcacaagttcaagagtctgcgcaagcacacccgtgtcaaactggctgccaaggccgagaaggcaaagcctaagacgaaggaacctaaggaagccgtcaagccggccaagatcaaggaagaggctaaaccgtccaagaagaaggaagatgcacaagtcaaggttcaagaaccggtgcagtacgtcgagagtgtgccacagctccagttttctagcgacccggagtcttcggagtcggaagacgaagaaatgccccaagcctcagctgtccagcatgacgataacgagtccatgcccgctgctgatggttcgtcggagtcggaggaggatttcgacgatgtcaagccccaatcttcaatccctgttaccccctcgcctgtggtcaagcagcaggcctccgagtcctccgagactgagtcggaagatgacatggacgataaacccgctgcaaaggcaacgccgttaccgaaggtggagctcttatcggactcggagtctgaagatgatgaggacgaaaagcctgctgcgaagacaacggcgtcgcctgcgtccgtgctgaagatggagctttcctcatcggagtccaagtctgatgatgatgtcgacgataaaccctcaccgaaggcaaccccgcaacctgcttatgtgccgaagatggagctgtcatcggattcgtccgacagctccgatgacgaggctcctcccaagcctgcttcgaagcctgtagcaaccgtcaagcctacgctggcagaaatgtcatcggaatctgaaagcgactctgacgatgaagccccgtctaagccagttgccaagccgacgcccaagcctgcggtcaagcctgctccagtggcagcgtcttccgagtcttcagatgactctgaggatgaagcacccgccaagccagcagcgaaggcaaggtccacacctgcccccaagccggtggcaaagaaagcagcttcatcgtcttcatcgtcgtcagaatcgtcaagctcagactcgtcagattcctccgaggacgaagctcctccgaccaagcctgctcccaagcccacgcctgctcctcgtcgcgctccggtacgcaacaacaaggcgggtggtatctccgagggcagctcgcacactttggtgaagaagatcgaggctttcaacgagtcgggcgaaggcagcgagctgcacctggacgccaacctcaatggcttcgagagactgctggcacacgactgtgccgagcgtctcggtcttgcgcacgagagcattggcgaaggtctggagcgtcatatcataatctcgcgcgctggtgccaagcgtcctgctgcggactctggccatgggcacaaggcgaagaagagcaagcaccgtcaccactaagttaggtctgctcgcgagcacctgggtcaatgaaaacacacacagcaagactctggcgacagtagcctagcgacaccgaacagctataatagattcctctttcttctccgtgttcatctctcgtgcttcgcttcctcaaaggctcacgtacgtatctcacagttccaaagccaacgagagcagctctaggcttccaacagagggttctagcgccatagctgcggagtgtccaattgttgctctaacctttcccctccagctccaccgtgtgctcaaagcccgatcttcacctgccaaagcgtcctaagcgactgcaactgcaccagcaactgcatacgaccaaccgaccgccttacttgcgcgcggcccttctgtcggcacgagtagcggcgtggaaacccgagcggatggcagccacggaccgcgaggaaccgcagtcctggcagtgcacgaagtacaggcggctcaccgagtcgcgcgtgagcgtcgtgttgggcgagcggcacatctggcacgagacgtactccgtgatgtacttgcgcagcagcgactcaatgtacttgggcacgtagcgaccgcggatgaccaggcgctggttgccgtcgatggatccctccgtacccagctcggccagcgtgaactgcagcacgtgctcggggctgcggtgcatcatctggcagatctcctggaagttcacccacagcgtcttcttggtgcccacgcgcatgagctgcggcggcttcatcgtgtggcgcttgcggtccgtcagctccgggttgttctcgtgcagcttggccatgatgcgcgccagcagctcgtccttgtacgagtacgtggcggggtcctgcaccagcaccgagttggcgtcgggcgcggcatcggcggcggcctcggcgtcctccgtcttctccttcttctgcggattgtcaaggtggtagttgttgaagtttttacgttagaatatttaatgagaaataataataaataaataaaatgcgaggagctacgataaataagacagctctgtccgcacctccttcttgaccttcttggacttcttcttcttcttcttcaggtcgaacatggcggccacatcctcgggcacggcgggcggggccacggcggcgtcgcccgcgggcggcagctcctgcttctctgcgacgtcggccatcgtgtctctgatcttgtgctccccctcgggcttggctggtgcaggtggctcgggtctttcttcctgacggcttccctcgagttttctggtggctggcaaaaatacgctcgtctgattggacgaaatttaatcagtcatttaggtttnnnnnnnnnnnnnnnnnnnnnnnnnnnnnnnnnnnnnnnnnnnnnnnnnnnnnnnnnnnnnnnnnnnnnnnnnnnnnnnnnnnnnnnnnnnnnnnnnnnnagccaacgagagcagctctaggcttccaacagagggttctagcgccatagctgcggagtgtccaattgttgctctaacctttcccctccagctccaccgtgtgctcaaagcccgatcttcacctgccaaagcgtcctaagcgactgcaactgcaccagcaactgcatacgaccaaccgaccgccttacttgcgcgcggcccttctgtcggcacgagtagcggcgtggaaacccgagcggatggcagccacggaccgcgaggaaccgcagtcctggcagtgcacgaagtacaggcggctcaccgagtcgcgcgtgagcgtcgtgttgggcgagcggcacatctggcacgagacgtactccgtgatgtacttgcgcagcagcgactcaatgtacttgggcacgtagcgaccgcggatgaccaggcgctggttgccgtcgatggatccctccgtacccagctcggccagcgtgaactgcagcacgtgctcggggctgcggtgcatcatctggcagatctcctggaagttcacccacagcgtcttcttggtgcccacgcgcatgagctgcggcggcttcatcgtgtggcgcttgcggtccgtcagctccgggttgttctcgtgcagcttggccatgatgcgcgccagcagctcgtccttgtacgagtacgtggcggggtcctgcaccagcaccgagttggcgtcgggcgcggcatcggcggcggcctcggcgtcctccgtcttctccttcttctgtggattgtcaaggtggtagttgttgaagtttttacgttagaatatttaatgagaaataataataaataaataaaatgcgaggagctacgataaataagacagctctgtccgcacctccttcttgaccttcttggacttcttcttcttcttcttcaggtcgaacatggcggccacatcctcgggcacggcgggcggggccacggcggcgtcgcccgcgggcggcagctcctgcttctctgcgacgtcggccatcgtgtctctgatcttgtgctccccctcgggcttggctggtgcaggtggctcgggtctttcttcctgacggcttccctcgagttttctggtggctggcaaaaatacgctcgtctgattggacgaaatttaatcagtcatttaggttttatttaagcgaatcagctggcgttactactgggattttagtttcagccaatcgccgagcggagctgctggagccctcacacttgcctggaaggagtacttgtggacagcagagccccctgcagctgaagatggcgacgcgcatcccgattgccttccgccgcggcccgcgcaccaagaagaaatccatcgacctcatcaagacctggcacatcttccgcggtgataaggtacgcttcgatcgtcgccaaactcgcagtagtcgtcgagatatcgagctgacactgatgcggaatgatatttgctggcaattgacaggtcgagatcatcgccggaccgcacaagggcacgcagggcgaggtcgtgagcgtcgcccgcgacctgaacaaggtcatcgtggagaatgtcaacatggtgggtggccccgctaactagatagccttcagagcagctatcgaggctgacgtcttggatttttgtcaacagtcgcaccgctacgtgaaggcgacgcctgccgcctccggccgctcgtacctgtcgccgtcgcccatccactacagcaacgtgaacctggtggacccgtccatcggcaagcccacgcggatcgccatccgctacacggacgagggcgagaaggtgcgcgtgtccaagaagacgggcaccattatccccaagccggccatcctcaaggagcgccacaacccgcgacgaacaggtccgtagctgctgttgttgctgctgctgcttgctcgctgcaacggtgtattgctgctcgttgctgacatgttgatgttgctgctgccttatcagagacgggacctttcgacacggcgcccgaggacgtgctggagcgcacggtggaggactgggaggtcactcgcgtgtaagcgtcgtccgtgctgttttagccatcgcgaggacgaccgtgagccacgcagttttcgcggcacatggagaaggagaagcatgcacgattgtacgcaaaggcacaacctgcagtcggctggttcgttgcagcgttgtgcagtcccatgcaggcttggttctcaagataatgatagacaagaagaggagcttgagcatgaccagcatttcttggcgtctatttcagttttgcctcgcctaaatgcagacgtggtgctggggtgcaaccgatttctgactctttcagcggcgtctaaaaggcgctcagaacgctgaggcagcgtcgaggctttgccgcacgacaccacgagcagtttttttctgctgttagccattcttgcattcgtagattggagccctggtgcggtcgtcggcagcagcgcaagtcgaagaagtatcagacatgtcgtcgcaccacgaacacgaagaagctcagccccttacggcggaggatcaaccgctcttcgacgcggtgaaggccgagttcggcgatcgctgcaccgatgacctcgccatccgcgtggctcgcgcgtatcgcggcatgaagaagaaccgcgagcagttcacgattgccgagacgaagaagattttggacgcgcgcgcggcgttcgatgtcgacaacgtcctgaagcgagacctgccgcagtccaagctctacaacgagtactggccgacctacatctacggcgaggacaaggaggggcacctcgtgacggtggaccgcatcagcgacatcaacccggacggcttgttcaagacgttcacgaatgtcaacgacatcatcccgcaccggtggcagtacatggagcgcatccagtgggagaaggtggccgtctccaagcggcgaggccaccgcgtctacaagcacgtgtgcattgtcgacctcaagggcctcagcctgaagctgctgtcaccgtcagtgctgagtcatctcaaggtgcgtcccccaatacctgtattgtaagattacatggtcgggctcacggtggtttgtgtatacccagcccatcttcgacgtggggcagctctactatcccgagacgctgcactgcctgtacatcgtgaacgcgcctttcatcttctacagcgcctggaaggtcatctcggccatcatccagccggagacgcgcgagaagatccaagtgtttgtacgtgactttactcgttttgctttgggttgcaacttgttggctgaccgggggaatgctgctgtgtggatggcaatacagaaagacatgaaggcgttcctggaggtggcacagaatcacggcatcccgctgtcatcacttccgtcctatatgggcggctcgcacccaggacgagttatgaacaacacgttcacagcgtcggagccagatacgccattcccagtgcctgtggtggcaacagtggcggctgagaaggctgcacccactgaagttgccgccggactagaagtgtgcgcaggaaattgagggtatgaagagcggagcacgttgatagcagaaataaagtcaccaattccattcaatgcttacaagtcaaccgttaattgtgtagctgcaggctgctgtcgtacgctttcattgacacgttgggtcttgagagatgtcactggtcgttcatcacggcgtgacgagttctctgtcaaagagctcctgctgcacctgttggtagaagatctccatgttcctgggtatgaccgggagttcgccactgggaggactgacaagctcgttcgcattcccgagctgctcggagctggtgcgaatgagcagcgagcacgctagggagctgcacactgcagccccgttcagctggaaggtgctgtcacagtcggcgtggatgtgaatgagtcgggcaccgacggaaatctccacgtcgctgaactcgcacatacgcacgtatccgccattgcggacgatctgaatcacggaggcgaacggtagcgcctccaagctgcgcacgaactcgtctctagcctcttgctttggtgtccccagcgtccagcgtacgacgccaccccaaagctggtagagctcgagtagtgtttcttgggaaacgctacgcgcgtagcaggtagatcggcaggtctcgagctcggccatagtccacagcggcatcaccagcaccagcgtgcgcattgtatcggtcgtcgacgtcgacatcagcgtgtgcagtggcggtgacaccgcgatggtgcgagctcggacctcaggaccattgtactcgatgttttccgtccatgtggagtcgcacaggtacactgtgctgcgagtggcgagctcctgttggaagctcgaacctctggtgccagcggtgacggtgccgtctgatgcgatgcggctgaagaacccagccatgtcgagcacgatcactggaggtttatcgagacgccgcaagtgccacagcatccagccgaggaagctcgtcttgccggtgcctgacgaaccggtgataacgacgcgatggtgaggcacctccgaatgatcgacgaaggccatggccagtagtagcagtacttgatatgctggacggacgtacagccgagacggacaagtctcggtctcgcctgaggacgtgtcgttcagccactgcacgccccgaggaagttcgagcagtgctggttcgcctgagccggggaggatgccgccgtagctgtgcatgtggccgttgtggggctccgaggacagcggacacagctcggtgttcgctacagcgtccacgaactgctgcacggagtccctgtccaccattgctcgcatcgtatgaagagggtggagactggaggcagcagttgatagttgatgtgggctggagctggcaaattggaaagtgaggcaggcaggcgaaggcacacaaggtgagttgagcccgagccaaacgctgggtggggcaaggggagcaatgtccaacaagtgcgaaacagagaccgtctagatcatgtgcgagcggcccctcggctcgctttgactcgctttgcttacatcggctgcgctgctgtcggtgggcatcgctcagcaccgcggatgcaactgtagagctctcagccatcacacgtttccggattacagaggccccactaagcgcctacaagcgtctgtagagcggttgacagccaccggttgcaggttcctccaagacgcgtcttgattgcgaaccggttctgttttgctccacgtgagatccgagacgccttggaatggagcacaacgtagtgagcgatggggtccttcgaccatctagtgtcgttcaagtgcgcccacgggaccagccctggcgacagcgtgggcgaggtgcgctgcaacgttgatggatcccttctcagcactgccgagttggcagggcggtagccaccgagcgtttttgagtggatgcactagctcgccgcttcgttcctttagaaagggtctgttcgtcgctgttcaccataatggcgtcgcggagatgcatcggtcaatcaagtggcaaacgctcgcgtgagccgatgcagctgtgtccaccaggtcgcacctggcgtcctggtggacgccttccctgcgaagatgatgcgaggagcgcgagaccgccccagtcacagtcacccagccttcacccacgcctcgggggaggatctccacgacaatacatggaacgcgctccccccagcgccaccgtcaaggataaccgcgcagatgactgctggcgagcaccatctctctcgctccgtcggcgcagcaacattccacgttaagttgaagtttaccccgttcgctcctccgattggtcgaaagctgtaacttgtgaaaatcgatatcatgtattcagagggaattccatatcataggctaatcccacgctgaggcatacgctcgaatccttggtggcggacagcactgcaattgccacttgacctgctgcgatgagccgaggacggggccgcggccgcgtgcgcttcggcggcagccgggactcgatgctggcggacatcatggacgagacgcgcgaggacctgggcctctcgcacacgcagatggagctgctgcacgtacgtctctctgcctcctcagcatcatagcgtcaacctcaacgtcaatgcccactaacttgcttgcttgctgttgctgctgcaatcgataggcggagactggcggggctctgtatccgcccatggagctgccgcagcctgaggcgctggccgacaaagaggcctacttgatccagaggcagcgcatcctcgcgcacaagctcgagagcctgtaccacccgtgggaagccgaccctgcaggccccgacgccggccgcaacgccaccgacccagcagccttcgtgcacgtgacggtgcccgatatgcagaaggccaatgaggtctacgtgccggaggagctgcgcgccaattcgctcagtggactgcgcacgccggcggccggcggcgccgccaaccgcggcatcatgcagccgcgtgcgttcgagaacgtgttcaagtcgcttgaagctcaggagaagaaaatcgccgcggacaaggccaaggcagcagaacaggaggcggatgacggcgatatggacgacgcggaggaggacctgggcgacgacatgaacgactacaccttcgactactacgacagcgacgccgtgagcaacgacggcgacgaggaggtctttttctagagctcagtatctcccagttgcgctggctcagtcgaagacgcatgccgcacgcgcagacggctggggaatggagtgcctcgagcttctttatttatttgcccaccccatcgcaaagcgtgcttgctctctcgctgcctgcgcaccagccgcaccacatagacatcgttccattatttgaaaaacaaaagaaaatatactacacgacacttcctgttgcacacttgcatcgcgatgcatgaagttaattaacgcaaacgagaacgcgacggtgaacacgaacgcaatgttaaaagcgcttgctaccggtactcgaacgcacggtggccgacgctgcgaattatcagatagatgaacttgatagaggctggaggatcttactcgtgctctccagacagcagcgaggcgctcagcggcgccagtcggttctcatcctgtgcgtcctccgtgacggtcgtggcttccgtatcagccgcagttccgtctgcattgagctcggcactcttctgcgccaggttcgagagggaatagttgtacatgaccgaatagttggccggcgcaatagggagcggctttacccggcggatgatctcaccagggcgcgggcgcgtgcgaggtcgcccccgaggcttgcccgttccgcgctgcttcttcttggccatcttggcggggcgctcgccatctacatcctcgtccttcacgtgctcatcaacagagtggtccttgacgaccgcgcccggattacccatgcccggcagcatacccgggaagcccggcagcagcggcatggggaggccgtaaccccacatggggaactgctgcttgagcgtcttctccgcctctgccttggctcgcgccgccacgtccttcttgggcgggcggccgcgcttgcgcttgggcacgtcgtccatgttgagcgcgccggtgggcgtccctgccagcattccgaatccgtccgtgcctacaaacggcggcgtgagtcccagcgactcggcagttgcggcctggtacgtgggcgacgcggcttcatctccggcggcctccgcggctgcagactcggcggcctccgcggcagcttcctccgacgtggcggcggcagcggcggcggcctcggcagctgcatcctccgacgccgtggcggacgagtccgagccggcggtggcgcccgtggaggccgcggccagcgcctgctgctgcagcggcagcatcagcgggaacatgggcatcatgagtagcgcgagctgctgctgctgcagggtcgcgagctcggtcgggttgaggttctgcatgctctggagctgctgctgctgcagttggaggagctggagctgctgctgctggagctgctgggtgagcagcgcctgctgctgctgctgcgccaggtcgccaccgctcttgggcgtcgcgtccgccgccggcttgccatcgtcagaaggcggcgtcattccggtgtagctgctcgaagtgaagcggggggatttcttcctctcgtagggcgccgtgcggatttcaatccaataatgagtggagaagcgcgccgagctgccgcccattcgcgcaaaatgcggaaaaaccttgcatcgaggtttttcatcaacaaatttgggattgacagaggttggtacttatcaagaccaaaataagctgctaaaagcaagataagtagtgagccaacacaattcaccgcgacgaagtcctgcaagaatgcaggtttgataataggttttagtctacttgatagccgtcccgctcgagcaaaccttcgtttcaattgaaaaaaccatataaattgcgcatgggattataccgatagtagctaccaagtattacttaagtaatacctaaaggtataacgaaagtccggcggaacttccgtgaaatatgataccaagttcattgatacgccagcgggacatgaaggctcggaacctttctgttgaaattccaggtttcattgcctcaagcgtgacagtgacagaatcatcccaaaaatgtgctatgcggccaagtggctttcaccaagactcatactgtagcaggcagaaacgagcgcatagaaattgaccagcaactggaagacttggtgcgcacattggttcgggtgacgacaaagctaagctacagtagttccgcacgccaagcgagtaaaactgccaaattttgactttcaaaagcaccatcttttgagtcgtggcctcttgaagcagagaaacggctccggattggcccaatctcagcattggtggccagttctgattgaacgattttaaatcattgaactggctttatttatagccaatcgcacgagagtagcttttggggagcccaatttagcgaacagtattttgggtcgacagaagttcgcaaaacgctgaagttggttcaacgagggttggcaatcgcaggaagtaggtctcaaccttcacacgctaccaacactttacgacagctaggtcccctttgccaaaccttcagcataccatactacatcaacgtcggactttgaagttcggagctctagatgcaagcgatcctgcttgcgtgacaactttctgaagaggtcaagaggccaggtgtcatcgttaaagctgcacaaagcttgcttggtttacattgtgtccgctgtgaagttgaacgatgtcacgccgagcctgcacgctgtagccgccctgcaaccatgctgattactgtcgtagcaaacaaaataaatctcgaaacgaagcttgctgttactgtagatccccccacaagcactccaagaaacactcccacatagttcttgctaacgacacctttccccgtcgagcttgcaaccaccaagtcggctcgtgtagccacacttgacgaatgttgaagtgatgaagtgacgaggccatcaccgaaaggcgtttctacgcacaaatcttacaacagcggagattcccatctacgggcctaaatgcggtcgtggaggcgccgggcaagatgcggactggcatgtccagtccagtcagtcgtccacgcgaaggcaagcacggccagcacggccacatcaacaatacggatgcagatcctgcggcaatgccacgggcgccagcggctttccgaatgcgtggaagcgcaggtggcggcgctctctcactttcaaatttgccggcagtcgggcgcacacgcctcgatgggcccgtggcagtctgcaacttgccagcatgaaccgcattgttggcctgcccaacactcgagactactgcagtcctgtttcggtggcagagctcttggcgccaccgaaccgtggtgctgctgtccccggacgagcagcgagttgcgcgatgagggggtggacagaccaccagacacatacaaatcgccataggcgctcgcggcgttgcgcaatgagggacggcccctcctccgcacaaaccctcatgtctttgtgtcgggggtctcgttgccaccaccgccagacgagagcagtcctcaaagagctccttcggatcaagaaacccctccggaagccccttactcgccaccatgagcctcatccgtcagtccatgcgcgccctgaaggccggtatgtgtcccccctccgtctcctctctctatgctcgcagctcccgcgtccaacggaccggtaggcgccgagatcttgcaactttagtgtgctgacttgcgtcctccccctcctttgcagtgaacaccaccgccgccatccgccccgctgtcgcccggttctccacggacggcaaggtgcacggtgtgcccattaacaacgcgcccacggaggacgtgcaggtcgtgatcccggatgtgcaccagacgctcgagtggtgcctgtcgtcgccccctcccgttcaccagttcgacgaggccccgcttgtcatcgagacctacggcgacgtggacccgtaccactaaatcagcagcagatccaggtcctgaggcgtcgttcctaggtgctcccggcgccaccgcagcccgctgcgacttctttgtttggcatgcataagtatgaagggtggagagaataggggcgcatgccggccacttaactggacgcgcttcaggcggctggcttgcttcaaattcagaaaaaaaacaaagaacacaatttggtaactttttgcgaatatgcatgccaggctgctgtcttcactgcgttgttgtcatcttcttcatagggtaattgttactttgccagttttgaaggactgttgacagtgcaaggggaaacgacacgggaaatacttgtcttcattcgttgttgcacttgcctgttgcacttgcttaccaccgctgcacgcgggtttatcaggtagtgtgtgctgttgctttaacctgctgaagaatggccgagcaatgcgccaagtgcctaccgccgccaggtttctttgatgagctgcatgtctgccaggtcgtcgttaatgatgttcgtcaggtgctccagcccctgccgctgcttatccatgaactgctcaattcacacaacacgcaacaaattgactcagatcagatgaccacatcatgtagcaaggcaattcaaagcctgcgcacctcaaagagtcgctgcaggtcctgtgggctgagctgacttgacggcagcggctgcgcctccttctgcacgcgctgaagcgagacggcgtcatttagtcgcgccttgtactggcctggcgagtccagcaacgtctgcagcttcttcaacgccatgctgcagttcaaacagacgcacatcagttagtgtcatccatcacacacgccgagccagtagctagagacgtacgcaagctgcatctcttcgcgctgaagcggcttgccgtagttctgcagcagctcgatgtcccgcatgaccttcaccagcgcgtggaagagctggacgtgctcgtggcggcatttctcaagcttctcctctgtagcgcgcgagtgcttgtccatctcgttgagctgcgcgcgcaggtcgtccgtgtacttgttgtacttctccgcatgctcctgctgcgccttgatacgcttcagcagatcgtcgaagcccaagataggaacgggcgcgcagttgagcgggtccgggttgtccagctccgcctggttccacaggcgctcgctaatgtgaggtggtcgcacgtaaaggtgtcgctgcgtcggatcgacggtgttgtacatgaggaatttgaagcgtgactgagctgggtcctggtacgccgccttcactgtgttgagctgcgccaccgaggcatctgcacctagaataatcggggcgggggcagtagacgctgccggagcggcgccaaatgctgaaggtgctgcgcccggtgcggtggtgccaaagccaccaccaccgaagagagaagatcctgttgcgggcgctgcgccaaacgcactggttccagtgcccgtcgttgtgccgaatccaaagcccgtaccggtggtcgcaggtttagctccaaagccgaatccagtagtcgtcgcgctagtcgccgctggagtctgaccgaagagcgctgctgtagtacttccaaatccgaaagccgacgtcgtgctggcagccggtgtagtgccgccaaaactaaagcccgtgcttccagcagccggcgccgcgctcgttccaccaaagctgaagccactcgacgcagcgggggcggcagcagcagttccaccgaagctgaagccgctgctagcagcaggagctgtgctggtgcctccaaagctgaatcccgtgctaccagcgacaggggccgcagcgggcgccgcaccgaaggaaaaccccgtcgaagccgcaggggccgccgctgtgctggtcgccggagcagctccaaagctgaaacccgtggatcccgccgcaggggctgcagaggtagcagcgccgccaaaactgaagccgccagaagctggcgccgccgctggagcggccgacgtggcgccgaaactgaagccgcctgaggcagcaggcgccgcggccgctcccccgccgaagctgaagccggcggctgccggttgcgtcgctcctgcagttgctccgaacatgttgattgccgtgtgaagtgtaaagtgtccctgaaagattgcagcagacagagtgagtgagtactaaatgacacaacttcggcgacggattccgcagcttctagagcgcttcagagcaccacaaagaacactccaggcacgtctgcgtctccttcattgacatacagcagcgggggtacggctattacctgtgtgcggcgcggggggcggcttctagacggtcacgcacaggcgcttggagctcggtcgcccttccgctcaacctccagatgcttggcgcgcactccagcgttaatccaaagcgcgtccattggccaaaaacatagtcacttaacatccaatcacagcgtcgttatctcgattaagtacgaatggatccttgtcgttctttcagcttcaaacagcggggatcgaggatgacgacggcgccggcggagcgcgagcctccggtgccgactccggcggccaagtggcgcgtgggggagcgccagacgcctcgctcgcgacacgacctggctccgcgcgcgctggcggcgaaggagacgcacccgctggctctggcgacggctttgtccgctccctcggtcgatgcggcagttgcagtggatccgccgccaagttctgcgtcttcagcgcatggagactcgttaaccaagcgaagcagcagcggtggagcgtcgccggagctcgtggtgctgcaggacggagacgtggacccgctgggtgtcctcggagcgccagcagacgcaaaagtggcgcagacggaggtcgtacgctcgaaagccgcgtcggttgatgctgcaattgttgcaaacaatggggaggcaagaggagaagccgcgccccgtacagtgaagcacaagtggaaggagcacacggaccgcctgctggccaagtacgcggaccacacgttcaagatcaaggcgagcatgctggaggtgaacgacctggagaacgagatctcgttcgctccgaagagcgactaccagaaggcggacgacccggcagaggcgtccgtgatcaagaagacgcgcgcgagattggagcagctggagcgtgggtcggagaacaatggaccgaatttcgagcaggacgagaagactatcgagatctcgcagagccagtacgtggccaaggtgaaggagatgcagaagcggctcattgcaagctgggagcagaaccacaaggtggaagcgctgcgaattgctatcaagtgtgtgaagctgctcgcagatacggacactgcaccgcagctctatccgtgcgtgtttgtgttggtgagtgaagtgctggacgcctttggcaagctcgtgttcggtcgcatccacgcacgcgcctccgaggatgaaaacggtcagcctctaccggagccactgggcgaacatttcatgagctcagacatcaacgtccaagccaccgagacgtgccgcaattggttctacaagacggcttgcatccgagagctgctcccacgaatgtaagtagtttgcgcatggtgtatgcttctagctgcctattcttttttttactaaccccggtgcctatcgtcgtcgtgctcagatatattgagatcgcgctgctcgggtgctaccgatttttttgcgatggcgagtacccgcagattgtagcgcgactgtcaaatatgatcaagtatgctattgtgtgtaggaatgctatgctgtcaatacgggtctctaaactgcatcttgttttgctcctacgatattaggggtgtcggagagccgatggttgccttgtacgcgcgtctgtatctggcactcaccagctccgagttgttgggaactacctcaccatccgagcaaaccgtcgtcgtaagcagcagcttgttcgactacttttacgctttcaactggttccgccgaaacaagctagagcattggctgctgacgcacaaaatggagcacgacgagtatctggcgctacactcgcctgccgtggaatggctcgttaaatgcgcagctccgggggccactcaggacagcttcgactcgttattggcgcactatcaagagtattcggacagctccatggtgttgaagcacctctgcgagtgttttggcgcccagttttacgcctcaacgccgaccgagatgctggatctcattcgcacatcctctccgtcgttggtctcgaagtgccatctttacagtctcgttgcggtgcagctgagcaatgtgcttgtcattgcggataatgaacgaggtgggaaactgcagtttctgaacgattcctggtcgtccatcacttcccaagagaacataacgcagtacatggagtgtgctgccgcctacatgaagcttatagtggctcatttctcggtacgttacgaattggtgtgtgtatggaacgcgacatcattgttaacatcgatgtgactattaacgctaaatgcttgttgtgtgttagcaccgagaggctcttattctgcttaaggatgtcgtgcgccacctgaacgccgcgacaccagaagaactcacggcaaaaacgtacaacttgctcggtgctctcattgagaatgttgtcttcggtgccaagcagcactacgagtttttctcgaagcttatcccttctacgccgttcctcgtaggtgccagtgagctcagcgtgttataaatgttcaaaaggctgactacactaaattattgcttgtatgcaggcgctaatgggcatgttcaagcgggagtcgagtgtggacgtggcaaagaaagtcttgcgagccttcgtgggcggaagcatgaagaagtcctcgaatcggtctggcacattacggctccatgtggtggggcccgaagctgccgtagcacacacacttttggttgtttgttgtcgagtgcacgacgccctcgactctctcagtaccgcgtccgagcgtgcggaggcgaatcgcgatatctcggcattcatcgcgcggcttggatacgtcaacgagactgctaacgcaagtgaaagagcccaagacgaggagcaggaggcgctgctgatgctgtacaccgattgccgtcgctcattttacaagctggagccggtcaaggaattgctgtccacgatggttctccggttggcaatgcacgtccacaagcgtactggtggtactggtggtggggttgcgtctgtcgtcggcggaaagaagcgtacacaggcacggcgaaacttcattcagtcttgtctggcgttcgcgcacatcacgatcccgtcaattgaggcgcctctcgaaaagcttcagctcttggtgtcagcagcgaatgtcgccctagtgacgagctgcatcccgcagatggacgcgctggtaaaagctgcgatcgtgttgctcgcagagcttgagccaagtgctatcgaatctgtccgccgcttcgacgagggctcagatgccatcgcatcgcttaccccgatgcgcggtgtggcacttggactgttcggggcagtgagtatcaacaacaccaacactgtcatcgaccatatcgtgcaagcgatcgcccagttgatgagcgtgttggtgtacgctccgtcgctaaacgacgaagacccgttctacttcgtgtctgctttgcgcaaggctgtgctggagcggttggcgtgggtgacaccgagttcgtcgtccgtagcgcaccgtcttgaagctggagttgctcgactgcgcgtgctactcatgctcgtccaactgtttggtctatggggacaacgggctctccctggtcgactggtcggagtggactcgaacgacgtactctacggtggggacgacacgttctacaacgaggtgcaggctcgcttcagctcgactgtcgaagaggtggcgcgtgaaattgaagccctgggtgcggaagtcgagggcaacaatgctgagagtggtgctgtcgttgaacggatagaggcagcgcaggtcgagctgatgttggactttgtcaacctggtcgttcccgtgctcgagtatgatgaatctcgcccggaaggtgtcctcgccgaagcggactccgccaaggcggaggaagctggcactggtagaagtgggagccgccgccgtaagaagcctcgatcaggagcggcacttgtccgcaagtgcatggcgtacagccacgagaaagcgcagtcgctgaagcaggccaagccgagagagacgtccacaagccagctgcagataactacgtgggtttgccggtattttgacagcacgcgcgcgtacgtcgccgagttcatgagcgggatgcccaagcgcgcagcaggagttcggctggacgcgagcagccagcaggccgtgcaggctttggccgacgctctcaacagcctggcactgtagtgaccgcgtagcaacgtgtatgtcgtaaagcaaacgaagcggaataagtcaagccaagcgagctatactctactttttcacaggcgcaccaagggcgccagcattcatctccagcgtctgtaccagtggcagcatggtgatcttgctcgtgcactccatgcattgccgagaaggcgtgttccagagcaacaagagagcctggcgcaggctgatgtcgcgagcttcgaatgaggagcaccagcagttgccgcggaccgcgatggactagcgccaccgatgttaccaccgactggtcacttttcagtccccgaatgggtcaacttcaaccgcgacgcttcaagatccatcctgaactaggcaagttcaggacggcatacagacgtcaagtgaaagcctgcccagcgtaagaaccgttacaattcctaggctaggcgcctgataacggacgtccccccaacaaggatatgcaaccgccccgttcagccgacggcgcagcgctcgccaggcaggctcattcccgaattttgagctcgcagctcaagctcctctcctcaagcacccacaccaagtacttcatcagccatgggcaagggcaagggcaaggacaacaaggaggagaagaccgccgctaaggacggtgagttgctaccgtgtgcttgacaactgcatcgtcgtgccctaatttgtgggggactaactggttgtgcgtgctgctgttccttgcagctcccaaggaggagaagggcggtaagaagggcggcaagaagggaggcaagaagtaaccaagctccactctgtcaagactctttggtctgcatttagtgggagacactcatgacgtagtgccctacggcctaggccccggccgaagccacgcgaataaaatatgatattcacgcacaccacctaagtcttctatccgtataaatagctttcccttgatttagtgcatggagagagagctatctcactttccacgttctagagcatgccaaccgatggccgagcagtcacagcgctaacgacgccgaacggtcggtatcgcttgaggacgcatgagctggcgcctgtgcaattgccaagagctcgagcgtcctcttcctctacgcctgatggctcaaaggcaaaggcggaggaacccacggctatagcccccgctcgcccgcgcgtgtcgatcacaggagttggcgctacccctcgaggtcgggcggtactggaatcggttgcgttcgaccccttcagccagtccgagagcttcaaactgctgctgcagaaccccgaggcaagcagcaaacgacgagaagatccggctgcggtgtcggagttccggcagtggttgctgcaacactttcctcatctcgtacggacgctccagtcgctatgtttgatccgtgcacagcccacgagggtgcagggggcacttcgaccagattcagcgaccttgtgcattgagtcggtaaaccaatgcagcggctcacaggaccgattagatgatgtcgatgaagaaaacgaggagatgaaggagcgtgattgcaataaagaagacaacaaagcggatggtgacgagtcctggcgactcatgcttcgctacgcaacggtgcggtctgcagtgcctggcgaagtaatcgggagccaaaacgtcacacgcagcacgttcgtgtacttcctgctcaatgggcactgcacgctctcgttccgccctatgcttttacgagacgcgaaggtgccttcgacaccttcaagtctcactaggatacacgctgccatgctcgggtgtagtgatcgccctgtcgttcagctacgagaacttgtggcaggcgattgctttggctttgatgctgctgcatttggattcaaccacctccttacaaccgcaacggcaggtgctgctcgccagcgtaattttctcggtctgcgcgaggtggctgtcacatacgtgttgtgcttgccgtaccaagtcgcccaacagctccaaatgctccagtgccggcgtcaagaggggaccgctcgactgccacccgccttcccgtactctttcgcccctgaagcagagctgtttcttcgcaacacgttcctattccaagccatggcagattcctcgcggcgctttttagcagcgcacctgcgccctgttgtcgtagcacggcaagagtacctcttcacgccaggccagccagtgcaggttttcatcgtgatcaccggacagctcaccctcggatctcctcgcgaggagcacgcggggaggcgagaggaggcagatctagagctggagctccttcaagcgcatgattcagtcgggctaactgaggcattgcagatggcgacatctttcgcgagatattgcgttgtaacttcggctagtggggtacgagcgtactcgctgtctccgacagtcttgctcatggttctgacacaggagccttcatcactgaaactgatccacgagtggatcgcaagccgaaagtcttggttcgagctgcggcgagccacagcgcttgctcagcgcaagaagcacacagcagaaggctcggaacacgtcgttcgactgacgctggcagcgcaacgacgtagtaagctggcttgctctcggtgcggctgggctggacactcgtctacttcggcagcatgcgttcgtgtcgaagtctcaggaaacaatctcgcagcttcgtccgtgctaaatacttcacgaagaggagggaggtcacgggaagacagtcaagcaggaaatgaacaggatgagggaccccgcagtgctcattgcgccgaccgcagtgaatttaccccagttcgccaaccactccccccaaacagtccagcaagccctcctagaacacccgcacaccgaaaactccaggttgacttgatggcgctccgagcgctgcaaatttcgaaatttacaactgcgcaaagtgttcactcaaacgaagcgttccggcgtgccgtgaatagccaagaagacctgtactcgaatacggaccacaacggcaaggacaacgacttgcggagctgtgctctgacgcagtcccttcaacggctggagatggcactagcacatgacataacatctcctggacgtcaaggaagaaggtagaccggcaggatctacgcgtcagatcatgggtacctatttcttctttagcacgcagtctcttgtgtacaccttgttgtctatctgcgccgtcgctttttgctcttcgacttccgagagctgctcttcttttgcttacccagggcacccttgagtggctcaaaaacgctttgaccgagaccaaagtgtttgtcttcgttgtacactccaccctgaagtgaatgcagatgccgccgatggtagtacgcgatcgggatagctggaatgtaccgaggattttcgaaatcattcttgggtaacgaagcagcggcaaggtcgcattctccagggaactccactgtcgggctctggacggtgaatacgtcaacgggggctggcttcgcagcctcggcaagcttttccttctctcgtttgcgctcttcagcatcacgatcgaacacttctagatgtagttcgttgtccgtaataaggcggaaccctgccggatacattgccccaggccaggtggtggtgaactgttcctctaatacgtgaaaatttccactggtagacacggctagcacactctgtcgggaacggtcccaagctagtgctagcacgccgtcttttaccccgacattgtgctggcctgttgtcttaccaaccactgaagcccggtgccacgtgaatagtccattctctccaacatgtcggtgacgtacaacgggcgtaccgacaacaaactcctccccaccgctgaagcagcatacagcccaaggcgcgcgtaccgcacccgtggagtgaagtgccacttcacgcaaccccaacgggtgctcttcagtggcgttagactcctcactcgaaccatccattacagtcgatgcttctgcatccttattcgcatccaacacgaattcatgaatacctttcgagctcgtgacaagcagcgctgtttcccgcaaattcacgcagagatccacgaactggataagcacgttcagcttgagactatcaagacactgcaacgtgtcagcatccagcacagccaacgtagatttcgatgtggcacagtaaatgcgcttcccagaacgaccataccgcgcacaggacgcaagcgcggggtgccgtgagctgttctgtggcgttggttgcgtgagctggtcgttttcaatgggaacgctctccagctccttgcgttctccagatacgacatccaagagcactggccgagagttccaaaaactaacaacgaccagcttcgggtcactagggtgcgaacttaacgaagtgatcgttccgccaaaccggaaagccgacacaagtgtggcagcttcgacgttccagacgcacagcctcgcgccgaggctcacccgccgcgtcgacttctcctcgcagccggcgaacagccaccgcgaatcgcacgaccacgcacattgcgacaccaccttcagcgcggtcttcaccacacgaagatctgacagtgtcaatacagcttcgccccctgaagcgtccgcttcatcttccgtcttggtctcttcactctcatcgtgattgttttcctcttccgcctctacctctgcttccgcctccgcctcctcgtcttcctccgtcgccacgtcctcctcgatggacgccgcgtcttccgtcctctcctcctcatcgtcctccacggacgcgtcgtcgttctccatggatccatccgcatctgctgcgtccacctttcgcctcttggctccattcgcctccgccttgtcacctgctgccccctgtccgtccatcttgtcgtcgtcggcggcattctccaccgctggcagcgcaatgagcgtcgggtccagctcgcgcgtgatcacgcggatggtcgtgttgtcccagatggtcacgcggccgtcgcgctcgcccaccgccacgagcgtctgcgacgcgttcagcgccaagcagttggcctgctgcgtgtcctccagacagctccaagccgacgtggggcgcgacagtaggtgcttctggaggtagtcgtcgtcgtcctcggcctcttccacgtaagctgcttcattcttcgcctctggcgtcgcgttatcggcgctagaagaggcaggagctgctgcttgctctgataccaagggttgctcacgttccgctgcagattgcggagcttctgcggggacttccacggccggagtttcaccattcgacgcggaagacgcagcggcagcagcctgcgctagttgttgccgccgtcgctcctcctgctgccgctcctcggcgtgcacgacgcgccgcagtgcctggttccacatcctgcgaggatcgacacccttgcgatttcgagagtgtgtgttttcattgtcgaaatgtattcatactgagttcaagtaattgctgatcgtcccactatgtcactattcatgtcactattcccgacgtacttcttcaagtgcgtctcattgcaagatctgctcccggatgaagaaggcgatgaagactgcgggcttggtggccgagaagctgacgtacccggctgtgcgccgcggcgacctggtggagacgctgcacggcgtgcaggtggcggacccgtaccgctggctggaggacccggactcgcccgagacgcgcgagttcgtgaccaagcagaacgacgtgacgcagcgcgtgttcagccaggtgccgttcgtgggcgagaccaaggcgcgtatgacggagctcttcaactacgagaaattctcggcaccgcgcaagtacgggggcaagtacgtctactccaagaacgacgggctgcagaaccagagcgtgctctacatccagggcgagctgcacagcgagccgcgcgtgctgttggaccccaacctcctggcggcggacggcacggctgctctctccagtcgcgccttctcggaggccaagcttggcgacggcaagctgttcttcgcccatggcatctcgcgcgggggctcggactggcagaccatcaaggtcatggccgtgcacgacggcaacaagatcctggacgacacggtggagtgggtcaagttctccagcatctcctggacccatgacgacaagggtttcttctactcgaggtacccgcctccggagaagatgaaggacgacaagcacgacgacgaagaaggccccaagcgaggcaccgagacggactccaacatgaaccaccagctctggtaccacacgctgcacacgccgcagtcgcaggacaagctggtgtatgcgtacccgagcgagcccacgttcaacgtgggcgccgaggtctccgatgatggcaagaagctgctgctgtacgtgcaggatggatgcaagaacgccaacatgatccacgtcgctgacttgagcgactttgacaacttcctaaagggaccgagtgactcaaccatcccagttatcaagcttgtggacaacatggactcggcgtactcgtacattctgaatgacggagactactactacttcaagaccaatgcgaacgccccgcgcgagcgtgtggtgcgcaccaagctgggcgacggcagcgctacgcctgtgtgggaagaagtgatcccagagcagccggactctatcgtgatcgaaggcgtccaccccgtggcgccgaaccttttggtcgtgcagctcgtgaaggacgtccataacgagctccacgtgtacaacctggacggcgtgttccagtacgagatcccgttgcctagtgtgggcactgtcggagtggccagcaaacgcacggagtcggagctgttctaccacttcatttccttcctctacccgggatccatcttccgcgttgacctggccaagtcaaccccgggctcggctcctcctgccgagctcttccgggagaccaaggtgaacggatttgatccaagccagtttgaggcggaacaagtcttctacccgtccaaggacggcacgaagatcccgatgttcctcgtgaagcgcaaggacgcacccaagaatggcgacttgcctgtgtacctgtacggctacggtggcttcaacatttcgctcacgccggctttcagtgtgtcgcgactcgtgttcgtccagcactttaacggcatgctggcgttgcccaatctgcgcggcggtggtgagtacggcgagcagtggcaccaggacggaatgctgcacaagaagcagaacgtgttcgatgacttccacggcgctgctgagtaccttatcaaggagggctacacgaacccggagaagattgccatccacggtggatccaacggaggtctgctcgtggcggccaccagtaatcagcgccccgatctctaccgttgcgccgtgggggctgtgggcgtcatggatatgctgcgcttccacaagttcaccattggacacgcgtggcgcacggactatggtgacccggacgtggctgacgacttcaactacattcgccgctactcgccagtgcacaacgtgccacatgctggcagttctatcatgcaaacgctcgcggagcgtggtgggttcccgtcggttctgctgactacgggcgatcacgacgaccgagttgtgcccctgcactcgtacaagctcattgcggaactgcaacaccagctcggcaactcggaggcgcagaccaaccctctacttatccgaattgatacgaagtctggccatggagctggcaaacccaccaccaagatcatcgaggagacgtccgaggtgtttgccttcatcgcgtggaacctgggcgctcagtttgttgcataaaggatagtgatcgcgtgcctggtaacaacgataaacgtgatgacaagcctgcagtcgcgatgtcccgaaagtataccgataaaagtacatggatttggttgcacccatactacgtagtagtactagcacttgatagcaggtcgttaaagaacttcaagaacttcatcggtagcctcatcgagcactgctctgcatgccgatatggcatcggggtcgcacaatatacttacaggcaggctgccgatgaactggagctgctccttgccggtgggtccaagctcgtacgtattcgacccttgcactcgcatcgtacactccatggccttttgcaacgtcaggaacgcatcgtttattttgtcccttgtcagcgatgcgaatcctcgctccacgccagacattagctcggtgagccccgataccgatgctcccagtgtaggaggcggcggcattttcagtgctgcttggattggcttgaagaggctgttgtccatcacggtgaagtctggggagtacggcggcaggttttgcatctgtatgttccagccttccttgcgtccttcttccgcgaacaccgcatcgcccgaagtgcggatcttcgcgctgtcttgctgaatgtagattgcgccttgcatgaggtgggctggcattgtatgtcgaatagcaggaacgatcagttccgtgatcattcgctgcacgtcatctttggtcaccgactccagggcgacaaactttcgttcaggaatttgttgcgacggcttcatatccgcttcttgcacctgcaattcttctctcacgaaaggccacgtgccaatcttgccgtcaaagtactcgttcttctgcgggtcccattgcggtcgagccaccgctgtcatgaacatgaccttagtcttcttgtccctcggcagcgagaaccacttcatgttgatgtgcacaacgttgtgcatatcgtcgaaaagtccattaggacgcactttgctgcagcagtatcggagccgctccagcttgttcttgtccgtgagcgacggcttgatcgagttgatggtcgggttcccgtcctccttcagcagctcgtagagcgtcgtcttggggataccgacagccgtggccagcgcacggatggatccacgctgggccaatgggatctccttcacgcgctccagctccgccgaccagtcgcgcttccggcggccgcggcgtccgaccttgcgcgacgcgatgtcgcacacctcgtcgccgttctccagactctgcaccgctcgcttccagagcctcgagaccgtgcggcggtccacgccgaactcgttggcagcgtccatgacggcgtgacgcaccagcttcgtggtgccttcgacgcgcctcttcatgaggaagtcgagcatggagcggcgctcctcgtaagtcaagttcctgctgccgcgctccttccaggcgctcgtcttcttgtccgcgctgtgcgtggtcgccggttgggcgtccgcggccatggtggcctctgcgacggagagcaggacctccggcatgggctcggaaccgtggccgggactcgcaggaagctccgccatgatgctcttcttctgacactcggatggtgagtggaggagacagttcgaactggacgcaacagtcggctgcggcccggattggccgaaatggagatttcatgcccctgttgtgtggtgcacacaagacaacttcaacgtcaacccagctgagcagctcaccaagcaaaatcacgcacaccagaagactactacattaactgaaaataaggcagctcgctcactcttgcggaatgctgaggagggcctgacacgctctcaaggcctctggtctgcacactacgctcacgggcaaactaccgtcctgctgcagactctttttggtcacgtcttcctgcgactcgaagtcgttcgagcctccagccgtcatgacacactccatggtcttctgcaacgccaggaagccgtcgtttatccgctgcttcggcagtgcagcgaaagcgcgctccacgccagcgacgagctcttcaattggaggcagctgcacggctacgctgcggagatgcggtggtaccggttctggataaatgcacttgaggaagctgtggttaagcacaactagctccgggctgtacgctggctggtactgcacgcggatattccagccgtctgcgctcccatgctccgccaccactgggtcgtcgggggtaagccgcacctgctgactgtccagttggatgaagatcggttcgcgacgcatcgaccttggcatcttcgtcttgattgccggaataacataatttgtgatcatactttggatttccttcttcgtgatgttctctaatactcggaagacccgcccgacttgagccgtagcttggtcccaagcgagcacgtcttgaacgtacgatcccagcggcaagggcgggtcggccaccacaaacggccagacgccgaccttgccgtcgaactcctgctggcgctcatcgtcccattgtggtcgagcgacagcgaccaggaacatcactttcgtcttcttggcgtcgcgactgctcggcagccagcaccacttggtgttaatgtgtaccacgttgagcatgtcgtcgaacactccgttcggctgcatcttgctcaagcagaagcgcagacgctctcgcttgttcttatcggatagtgccggcttgatcacactgttaactgtcggcttgacttccgtgctggtctcctgctggctgtccgtggtggtggtggtgacgccgtcctcatttcgcagtagccggaagagcgtagtgcgcgggacgcccacagcggacgacaacgcacgcagagagccgcgctggttcagcggcagctgcttcacgcgctccagcgcagccgagtagtccttcttcttgcggccgcagttgccgcgcttcttggacagcacctgcttcatcaccacgtccgtggacgcgccggcatccagcgccaccttcatgaggttccagacgcgcgacacggtgttgcgatgcacattgtacttgtccgccgccgcggtgatgaccgcgcgtggcaggcgcgtctcgccctggctgtgcttgagcaggaagtcggccatcttgagccgctcctcgtccgtcatgttgggcttgcggcggcccatcaccttttcgtcctgcgcttcgaccaaggcactggcgtcgaccggcagcggaggctctggcaggaaggccgcgggctcctgcatcggctgcaggctcgccacgactagttgggggtaaacttggaaaatggagaccgtctgggaccatctaattcggaaaatgccatttcagcgaatcagcgagctggaaaatcgtctccgtcccggaaagattgcaccgcgatcgagccctattgaagaccggcgaccacatagaaaaagccattgcgatgctcaagtaccagaagtggctcgccgcgttcgtcgtgctgctggcgctgtggcttctgctgctgcggtacgcgaccgagaccgtgcaggacccgcgcatggtgcaggtggtgacggcgctgcccatgtacgcgctcgtgtccttcggcgcgtactcgctggctgtgatcgcgctgtccgtcatggcggtgcaggacttccccgaggcggccaaggagctcgaccggcaagtagtggaggccaaggcagatctgaccaagaagggattcaagttctagaggctgcaggagggacaagatacgcgtggagaggcgagccagcgtggtgcagcgcggcggaacgaagaaacccgccttcagcgcgtgctatacagctcggattgcagtgaatggaggctcctcctgatcgcaagagtgtcgataacgagttgatattgcagtggtgccgacatgttcctcgtgggtgtcgtgacgggctgcgagctgcctcgagccgagcgcatggtgctgcttcgtgtcgcgactatcgtagatcctttgcaaggtaataaatgtcatgtgtccacacgaaatcctgacaaatcgactgtttccacaaaataacctcgctcacgaggtttttcaggtcggtggatcgcagtagtttcacaaggcggcggacacgaccaaggagcgcggcattcgagtgcagcttagacgtcgcgtgggtgtggctagcagacgcgtatccatcgggaagagggcgcattagattctccagctcctcctctctcgatcgcaccccgaagattctccattgaccgtgtttggagttctctacaagctccaaacaaaagtctattggcctccctgggctgacctcttcagccagtgattgactatgggaggcgagtgcgtgccggatcattgccgcgagtgcggaagtgcggacgtcgtgacggacttcagcgcgggcgacgtcgtgtgccgcagctgcggcatgatcctcggtgagcgcattatagatgattcccccgaatggcgaacgtttgctaatgatgaccggggtggtgaccccgctgcgaaatccagagttggcgacgtcgcggacgcgcggctgaacagcctctcactgtcaacgtacctggtcgacacgaagaagagcggcgggggcgctgacggcgagcccgggcacaaacacaagcggccgaacatttcgtccgatagcgccaaggtcaggcgcatgcagcgcaacatggcgcgcatccaagaggtggcagactatttgtcgctgcccaagaacattgtggagattgcgctggacgtgtacgcggaagcggagaagcagggtgtgaacatgcgagggccggaacgggagagcatggcggtcgcagtgctgtttatcgcgtgcagaaaggcaggcaatgcacggtcgttgaaggagtttgaagaagcgtctggagtgccgaagcgacgaatcggcaagtccttcatgagcctgcagcggcgactggatcttgaggtgaagcaggcgtcgaccgaagagtacgtgcagcgcttctgctcgaggctgggtctgccgaacaagacacagatgattgcgcacgcggtggcgaagaaagcagatagcctggagctctcgaacgggcaacccccggttgcagtggcggcgtcggtgatctacttggtggcagcgtacacgaactcgaagcggtctatccaggaaatcagcgacgttacgatgatcggcgagaagagcgtgaagaaggtgtgcaaggagctgaacaagagccgcgtggttctcttcgagggagtggtgatgacttagacgacagctgaccgcggcgccaagagaggcgatacggcaacgagagtgtgcggagacgtagaagaactcgtaagtaaacaaggaggagggccaccagacactcaggttcgtatatatttataggaggattcgcgcctcctatttgcatggtaagacaatcaagaaatctcttgaacagtagaatagctctgtctgtcgctgtttgctgttgatctcattcggcccacactgacgctgttcttgcgtgctctttgtatcgatttcaggccggatacagatagagaaacatagagcttgggacaatagagagaagaagtggagacgcagccacgatgcaccaaggcgcaagcatagatgactgtgacacaagtatgccgttgctgtacactacgtaatgttattggatgacttctgacgtgacgcactctcgtgactgtgaacttgtacttgccctgcttgcttggtgaattgcctgcgtgcaaagcgaaatctggtacccgatacccggtgtcactccgagtgactcattcgtacacaagttgcgcgatctctatccaggatgtgtgtgtccgctgacagcgcttgagactccacacgacacctcgatacagcagctcttcccggttgtttagtcgacgcagcaccagttccaggttgtctgagagctgcagtagcaataaaagcagtttaaatcatagagcagtcgcagctcagctcaacgcgctaacaaagtcgatgccattgaggcgcccgtacctgtttggtgcacggctctgagaagcagagcgagatcccgcacgttgtaaagcaccataaatatccgcagccgtagcatgggaggcacgggaagtagtcctccacggtctggttgagcacgtcgacgcaaaacttgaactccctcctcgatactacgcgcaacagacaccgatgcaacgcgccacttcattgtaagcgccgacctcacatcactgcaacaaaccgaggtctaagatacggccccacgtactgatcccgtccagcgctgtcgggaacacgtcgtcgtacgcggacgagtagccgctcacggtcttcatgccggtggcctccagcctggccagcaccacgaggttgtggccatcgccgggcactaggcgctccgtcgacatgagcccgctggggctggtagactcgtcaagcttgtcactttgccaatcaaaaggaacggttgcgctcgtccggatcctttttatttttagacccaaagggcgcgaaaagatacttcaactactgtaggaaaatatgtgctatacaccagattagtgtgagccacccgcgtatccgtttccacaggggaaacccagcttctttctggaagctcctcgacattctctgtcacagtagaaggtcgagcagagccaccaagtccgaaggcgccacagttctcctcgtcgcgctcctcttcctgccgccatgtccaccgccgcacgccgacgactgatgcgcgacttccgcaagctgcagaacgacccgccctcgggcgtgtcgggcgcccccatggacaacaacatcatgctctggcaggccgtcatcttcgggtacgaccagcgaggactacctaccgaactgtagcgctctatagtcgactcagtggcgctaaccctgcattacgttctccacgacagaccggacgacactccctgggaaggcggcaccttcaacctgacgctcgagttcagcgaggactacccgaacaaggcgccgaccgtcaagttcatcactaaaatgttccaccccaacagtacgtggctgtcaccaggctgtggagatgcgttatggctgactaattctttgtcgctgttgctgcagtctacaacgacggccagatctgcctggacattctgcagaaccagtggtcgccgatctacgacatctcggctatcctcacgtccatccagtcgctgctgtgcgatcccaacccgaactcgccggccaactcggaggccgcacgcctcttccaggagaaccggcgggagtacaaccgtcgcgtgcgcgagatcgtcgagcagagctggcaggcgatcgcataaaaaaaactcgctcgtcggacgcgccgtgccgcggcgttgtagtgcactgttgcaaggagctatctcttgcgctgtgatgcggggcctggtgcaggaataggccggtgctatgctatgcctctcgtttcttttgatcccgctccaagccggcatgacccagggcaacttttgcatcgtgcgtgactgactggaagaatgccacgaagcgcggcctgcagaccacgagcgatgatgacgatgatgatgagagggggtaacaggacaaagctgggggcagtgcatatatacgagggaaggacagccgtgatgagatctaggtcgggaataggcaggtgcatgaaacgaaaggagaagaaagaaagaaagaaagaaagaaagaaagaagagaacaatactctctgactaactgctgtcgttgagtctactgggcgaacggtgcttccgcagcttcctcgacgctgtcgagcaactggttggactggacctggacagggttgaagcgcggtttgagcatgggtgccttgacggatccggaggcggcagcagaggccgcagccgcaccgaaagaagacagctgaatatcgcagcccaggtcacggagcgctgcgtaggcttcatcgccgcacccgcggtattgctgtgcctcacgaagcagcggctcgatttctggttcgtcttgcaggaagcgtgagcgcagctccacgctccgtgctaccatgttgcgcacggccagacttgcttggcgcagcacagctacgtcacgacggtgagcctgcatggcgcgcgagatttgccggactgccccgagctcgactagcgcgcgactgttttctggagagcggagcgcaattgcagctagcgtggcgcaagcgttctgctgaatcgatgcatctgcctcatgccgctgcatgactagcaatgtccgctccacgcctccagactgcagaatcgcgcgctttagatcgtccgccgctgatacattcctgaaaaccgtgatgcagcgcttggccacaggcgcgctgtgctcgaaagcctgcatgacttcttgcacggtggtcaatccgtccagatctgcgatctgctggcagttctcctccgtcacggcaagttgcttgagcactgcaagccagttcacaagtagatcaggcgatgcgttcaactcctgtgctgtcgaatcgctcctcccaactagacgtagcacctctaagctgtacgggatgatgtcgcgctcgatgagggccttgatggtatcctgcgcctgtgagaacgtcgcgcgcgggtcgtcgttgatagtgagcactcggaagcacagcgccaagtgcttggacagcatatcgttgtccttagctcgttccaaatacccgcacagtgcttcggctccacctgcctttgtaaagtgcgctttgttgccctcgtgcttgacacacgctgccttcaccagcaccaacactcgcaccaaagtgtccacgtcctcctgctgacgcctcacgacctccacaagtcgctgcataccggcaacgccaacgaagtcttggttgtctgtgctgtctgcacacaacagcgccaacaaattgctgcaagacgccaccacagcggccgcgtccgaatccagcagagccagcagcgtatccaccgcatcgttgcgtcctgccaccacgcgagcctcaggaacttcctcacagacgctctgcagttcggtaacgaggtttagcacttgatcctgctcgctcttgagcttggaaagctcctgcagctccgagatgagccgcttcagccgcgcaggcagcggctcctgcccgtcggccgactgcgccgcgccgctcttgatgatgttggacaggtccacgccctgcgacccgaactgctgcacggcgtcggccaccgcctcctctagcgacatgtcgaactcctccacattctcggccacgcactcgtcgaacgtctcctgcgagatctgcctgcgcgccgccgacatgttgctacacgaagggatgacgtcgtccaagtggctacagtcacacctctataaatgacccagttcgctcggtcaaatacgctgtttcagttaaagaattgatcagataaagaaatggctacacttctaatggctacattttcatatcagccgttttctatagaaaagttgggggggtggggggggggtggggtacatagaattccccccccaacttttctaaggggcgccaagttggaagatcggagcacgaagatgaaggcggacaagctgctcgtggagggcgtggaatccttggaggagtacctgaacgagcacgagatcgcgtgtaccaagctcaaacaggtgaggtcatgcttgctgcggcaactgcacggtctgtagagacgatattgacgttgtatttggtgcgcaattgcgcagggttttctgaagctgacgaaggctagactgcggcttccggagcatgcgttgagtgagatctcataccacgaggagtttgaggcgtctcgggtcgtgacgctggactccgaggggaactggcaactccgagacgcagctgacacagtcgacggcgagagggaaggaagctcgctgcatcatcggagagcaggaaagaccaaagaggagaaagactctgaagttgtagcaagtagttctgcaagacccactgcggacacactgctttggtttagctcgttgccaccaagtgaccttcgccaggcgcaaaagcagttctcaagcggtaaggctctgttgtaattgggttgaagtgcccgagatactttcgctgacgactatgtgctgtgcattgcaggacttcaagcattgctagttgctgcagcatcagcgaaaaaggttcagcgagtcgtacacgaggtcaacggactttgataataatgaaaggctcaagtgcgtattcggattgaagagcgatgatttcgccatatatttcgttacctctcgcgctctagcctggcattcccactgcagagaggatgcgcagcgtttacactgattggcgatggtggaagcgctcggattttcggccgaaaaggtccgtaatgcgttgtttcaccttgtccacagccatgtctatcttaatgcccgtctccttcatgaacggcacattcatctctttgcccgtgtagcctcgctgcaggttacgacggataaacgtgtcgtactcggcgataatgcgtatgatcagatccgacgtggagataccgtccgtccggcgcgtctccaggaacttgcccatagctttaatgcgcgcgtacacgtcaccctcagacgcctcaccagacgcgtccgagtacggcagtgcgtcgtggcacacgtagtcgatcttgtgcttctccagaaagtcgtcggacagcacccagggtgcatcttctactacttcgtccacccacttgcagtggcgcagcgactcgtagcgctccttgtccgtcatgaccgtgcggcccttgagcttgtgcgtgatctcatcgttgcagcagccaacgagcaggtacgtgttggggtaggcctccttgcactgctgcagggccttggcgtgaccgaagtgaaagaggtcgaagatgccgtcggcgtagagacgcagaggacgcccggtcagtgtgccaggctccccttcgacaagcatcttgcggaacggcgcggagcttgaggactcggtgctggttgcgctcgtcccgtcagagctcacaagctccggcttggcaggttcgttgttcatgttgctgtctgtctgctatggcagtagtcaagcggaattggttagaatgggggttatcccaagagccttgcgttgaaggtgtagaaccttaccggagccatgctgtgtctttgttctgattgtcgtgttcgtagccgggaagaatactaaatgggatgatgtaggcacccacccgcgcgccgccgagtgcggggctcttatcagcgacagccgcagcggggctgtcgttggtgggagaggccgaatgcgacgccttcttccaacgtccatctcgatgtggtttgaggacgaggcccacttcaacattggtgtgcggcacaccatcggccatcacttgccgaaagctcagaaagcatgacgatcgaccacgtcgcgcagcctggcgaggggagcgtgctggtcgcccggctagcgagccgccacttccggcccggcggcgtcgtcaagggggtggtgcgtctagtcagcgaccagcagaaggccgacgcgcagtcggagatcgcccatgtggtggcgcaggtgcacggccacgtcaccgtggacagcaacctcctgacgctgcccgtggtgcacgtgcagtcgcctcgcgccgcgtcgcaggaggagcgcgcgcagctggagcggaagctgtcggaggacgtggtgctgttcgacaagatgggcgcggcgctgcccgacgtgcgcaacttctccggggacacgggcacgtgcatcttccgctcggcgccgtcggtgctgctctcggacatcaacatcgcgcccacgcagtccgagctcgaggccgctgctgcgaagggccacggcactattgaccccgtgtctgcagcggaggctgcgaaggaggggacagcggagcgctgcacgcgcgagttcgccattgcactgcccgacaacatctgcccgacgttccgcggctcgtcctccaaggtcttctatgtggtctccatcacggcgcaatgtgccgcggcggggagcaagccagtgtcggtgcacttgccgttcgaggtgtatgggtccgagtactttttcgaggccaacacggtggcaagtgcgagccatctcgcggcgagtcaaggcaagaccgacaacagtgcaggatctgccgacaataatggcgagaccgcgcctaagaaggcgcatgttgtgggcggaactactcgcgtcgggcggctggaccgcagtttgtctttggccccgcaacccgtcggagtgcgcaagggcagcgagatcgcgttcgagctgcggccttcgctcatgcatggtcgggtggaaacggagcagatgcagcgcgcgcagacgagcatctttacgattggcaaggacagtagtcacctcgtgcgcttcctgctcaccaagcagttctaccagccgggtgaggtgctgctgggcgtgttcgacttcacgcgcgccagcatcccgtgctacgaggtgtcggcgacgctgtgtctagaagagactctgtcggcgatggcgctggacccggagcgcgtggtgcagtccaaggtgtttggcaccttccgcgagcacacgctcggagtgctgcagacgaacgtgcgcttcagtatcccgcacgacgcgctgccgagcatccggacggacctggtgcgcttccagtggctactccgcttcgagttctcggcaggcgccccgccgcctccaggcgagtccggctccgccccgcagcggcagactttccagtggcaggtgccgatcctcgtgcagcccgcggtggcctcggagcgcaaccagctcgccaacgtgccgcacaagctctactcgggcagcacgcgcgtggcgtcgctgtcggcggcgtcatcggcatgatcgtcgaacggcataacaagttgaagtcgatgcatggcgcgtcacatttgcactcgaacaataactgacgaatcacggtactttgacgtatttaagcgaggtggatacagtacttgcataatttttccgacgtggcccgcgtgtcaggcagtggagttttcgaccgaaaagaaccagacggactacttagtaacagcgagatggcgagaaaggtgcgtgtcccccactgcgatctcccgagacgaagtgtggagcagctcgaagatttccggctcaagaggctcggagatccgttgggtctaagcttggccgcatcgactgatactttggggtgtggggattcgatatgtagagacgtgccaatgagatgaaccacgaggaggaggccgaggccgaccaccgctcccccgccgcgtccgccgaggaggaggagaccaagcccgagacgggcgacgtcaacgacgacaacagcgtcagcagccaggagggcgaggccgagccgcagccggagccctaccgcaagaagctgaaagagggcgagcccggcacgctgaccggccgccccctgcgcctctacgccgacggcatcttcgacctcttccacttcggacacgccaaggccctgcagcagtgcaaggaggcctaccccaacacgtacctgatcgtcggctgctgcagcgatgagatcacgcacaagctcaagggccgcacggtcatgacggacaaggagcgctacgagtcgctgcgccactgcaagtgggtggacgaagtggtggaggacgcaccctgggtgctgtccgacgactttctggagaagcacaagatcgactacgtgtgccacgacgcactgccgtactcggacgcgtctggtgaggcgtctgagggtgacgtgtacgcgcgcattaaagctatgggcaagttcctggagacgcgccggacggacggtatctccacgtcggacctgatcatccgcatcattgccgagtacgacacgttcatccgtcgtaacctgcagcgcggctacactggcaaggatatgaacgtgccatttatcaaggagaagagtatcaagtttgacatggcagtagacaaggtccgcaacgatgtcgacggcttcgtacacaagtggatcagcaaagccgatgacatgcagcacagcttcctcgagctattcagcaaggagggccgcctggtaagttgagacgctgtctgttgatatgtcgtatacgctgacaatccggctaacgacgttgctgtatgcacaactgttgctgccacgtagcgcacatcgttccgcaagcgccgaaagatcattaaggagcgcttgtcagagcgcatgtccgagatggcgcgtgaaggactgtgctaaggagctttggtgggtatcttcgtgggcaaacttctcacctagacagaagtttgcagcgcgtaggtctttaggcttgggtgtgtgcacttgatttgtatggcaacttgcatcattaaccactgagaaatgataagacatgcatctctcgctatgtgtatccgtgttgcttcatcccatgcgctgccacgttgagcaccacgcggactttgcctgcggaagtgacacgcgttacctcgcggctatcgccttgcgccacgaacttggagtcgaagtattcaggcggcgagcccgttagccacgccacgaactgctgcatcactgaagacgactgcgggcgaaacagcggcacctcgcgcacggagcaacctggcattactggaaacgcgacggatccgtagccacgcacaacgtcacggcccaatgcgtcaagtccgtacacacttagcacaagtcgtggccagccgaacgggtttgtgctcttgaacgacacgtcgatggggaagttgagcaagatttcgtcctcgtggctggccaggtacgcgatctgtgagagtccattctcagccccctgtaaggcagaagaaggctaggtaagccacgtgcactcgccaaagatgtcagcgattgcaaaggagacttacgtgaagtacgcgccagtcaacgccgtaggtaatggtatatctgcagtacacgttggtcacgcccgggtactaagagcgtgaaagcgtgccaaccacagctataagttaggttgtcaccttcaatgcaatactctcactaatgccaggctatcgacgcacatacgtgcacgctctccacttgacccgagcagatgacctggaatccggcggcaggctgcgccgcgggcgtcgacgtcggcagccgcgtcaccgccgcagatgcatcgagaggatctccgcttgaaagtcctcctgacttcctcagccgcagccgctccagcgccttggccacggggtcgtctccagcagctccgctcgacgccgccattgcttgaagtgtcgcttcgacttataacttaccgtcagaaatatatattacacctaggatacagcatgtaccgtaagtaaaaatgcgttattgcaggtccgacggaacccagtcgaaaacccgtttttcgtacacagatcgagtcatttttggcctacagattcggcaatcaacaagggatttgtatgcatcgtgacagatgcagttctgacggatttcatccggaaggccttgcatacgcctcccgccgggtcttgccaaaagaaggaggcagttcaaacacctaactgccggttttagccggcataccgaatttagacttggctatcggcctgacagtttagaaagcctttgagtttgtatgggtcggttcgatgtctgattccatgggactgtgctaaacggacgcaatggcctctcgtcaaggccgggccgcccggcgctattctgcacggctgctggagctcgtattcaaggagatcatgtacatcgagggcacagcctgggtctcgctgcaggcgacacacgcactctacagcatcgatacagtcgggcgccgtatgctgcaggagattctcgttttcctcgacgctcccatcgacgaagatacccccgccgacgtattgtgtccgatacaacatgaggggggggcactcaggtacggggagcatgataataccacgaagggtctgtatttcctgcaactggcgccgctgaagaagttcacaaacgaaatgggccatttcatctgcggcaaggtgggaatgagtgaatgagtgagaacgaccaagagggcatgagccatcgtattcaaaccgagagatacctggacgatctggggcactacggacgggcgtgtagtgtgtcgctggtatatgccgtttgccgactggacgccggagggcaccattaagcgcgcggagacaaggctgctcttctacctctcacgaatgggtttgatgtttccttttcgtgacgacttagagcagttgaagaaggaattgctgctctttcatccaagtcatatcgggctaatacgtcaggcgttttacatggttgtgaaggacttcgagcgctaccttatcgtacgccggtgcgctgtacctcaacctaatgctgatgcgagggatgctgcgattgccaggattgctgtagcgcgccataacgcagacaccacaagagccaaggtccccttcgaccagaggtccttagacggggccatcatattatagtttcggtgatattctattgtaaatgctcaaatgtaaatattcggttatgtagtgtgaaattttggaaactatcgataaattctcaatagcagagtatataaaaaagcaacgctccacttttacttaggcactaaatgcggcagcggaggggtggagtgggccgggtcggccaagtttcgaccggacccgcgaaacttggcccgagccatttaaacaggcgagacccttttatttttctcccccaaaatcgaaggccgaccgaccgaccaccaagcgatggcggatcgggcggagtcggcggacgagcgcgcgctgcgccgcgagctgcaggagctctccaagaagcgcgaggcgctcgacaactcaagtgcgttcctgcccacctccctgccagtctgtgtagttagtaggagcttctgggctgcgtgacggccagggaaagccacatgttgcgtcgcgatctttgcgctcattgccttttgtgctttttgctgttgtccacagagcgtcgaggcagcggagcagcagcagagggagtagcaggtcgcagaagcgtgttcgcgcgcctaggaggcgaaccggcgcgcggcggaggcgcaggccgacaggtgcagctgaaggagaacaatgctcggggcaatgcgtcctggagactggggaagcgcgacaacgaggacaatggccagaacagcgcagtgaagcgtcaaagactgcactcggcagtgtccaggcctgagggcgctcaccacacagagaggacggagactagcaggacttctacctcagtttcttcgccctctgcgaacaatgcgcgtgcccaagagcggaagcagcgtgctgtggcaccgtacgctcaaaaggacggcattgcgcgcagtcggcgcatgttcggagcgctgatgggccacttgggcaaggcgaagcgacagattgagaaggatacggacctctttaagcgccaggacacgaagcagcaggaggcagagcagagggagaaaatgcagagccaggatcgcgagaagcgggctcgtcaagaggctgaggtggcgagactggaggcgtcagtggcgcgtgctgagatggaccgcagcgagcagatcgcacgcaccaaactggagcacttgcagacggtccgaaagagcgaaagccaatccaagttcctggtcacgatcgcgtcgcctccgctctgctaccttccgtcgaagcacacgaaggagacggaagatctggtcgcggcgtctatggaggctcacgaggcgaagatgaaggctctttcgcagagtcatgacgaaaagctgcgaaagctggaggctgagtttgcaacgaagttggaacagctacgcgaagagttggaagctgcgaagaagggggagaaagaaaaatcgcctgccaaggaggcatctcgtaaagagaaggaagatgcaatggaagatgacgacgaagacatggatcagagcagtaagaagccagaggaggacaagaccactaaggccgatgcaagtgaagatcggaagtcctctgatagggctgctgaaaaggcttcagacatggaggtggaagatgaatacatcgtgcaggagagtgtgtctgggagcgaggcagacgatgtcggagccagtgaagggaggaggggcactgggggagataacgatgatgcgtctgcaggtgaaggcgtacagagtgatgcagatgtagaacaagtcgcttctcctcgcgcgacagcgaacggttctcgcgataacgttaaggctgcaccgaccacggaggcttcgtctcctagccaagccaaagacgagaaatcaaacaccatgcagcccaagaaggagctgcaagacagccctcggcagccagcaagggctgttgttgacgacaaagcaaaggagggcgcaaagcctgccagtcgggaggaaaccgctgccaagcctgcagaggatggcgatgcgcagtctgaaaacgctgctgccgagcccaaggaggacgcggtagcccttgtcgataagatgaaggtgacggagctgcgagcagagctcaagaagcgaggactcgacgtcaagggcctgaaagcttcactcgtgcagcggctcaaggaggcgatgcagaaccaagacgaatccaagtaagtttcgtatttatgctggggatacacacaatacaccagaccttgtcgcgcatgcaccattgtcactgcaagttgacttgcaggaagctcgcaatgcaaatgtatccattccgtcaaaacctctcctatgtcatcgtaagcccaatagactatcgaacatcatccgagcttgaccagttttcatacgtgtcactcacgcagatctcgatacttggcgacgatggaaatggtgcgttgccttgagtggccccgcgcgccacagcggccctcagccctgtgtgtatgtgcattagagtacagctactgacttcggcgttctgtcggatgctgcaggaaatcccgtacacgagccctgtggacccggagagctacggcttcctcacggtcgtgctgctgctgacggggctggtcttcatggcgctcttcttcacgcgcgccgtggcccccaagaagaacgcgctggtggagctggtgctggccttcatcgcggctctgctgctgggcttcggctcgctcttcctcttcctgtgggccgagatctacgtataagcaagcacaagtcagtccggtctcagcccagcgcagcagcaggctgaagctcgttccagcgatagaaggcgcaggtgacagcagtacagagagagagagagagggagggcgaggagcttgcagttttggtggaggcgagcgcgcgcgctgggacgagaacagctcggcgcaggacagtccgtcgtcaaattgaagtagactcaggcttggcggatcatagcgctcctgccgctgctgctgctgctgaagaagacaaaaatatgtttattgtttttgcgctgctcgtgtcgaagtgttctttcattcgtcgagggcaggtggcgatggctgggaaggacgaagatgtagtgtggttcgcttctcattgctttaggcttcgccgttcctaggttggccgtgccctgacgttgcgctcgctcgaccgtcgcgagcagatccttaccaaaaaaagagtgctgtctacttcctacagaagcgtgggtgaggcgtgcgcactgcacgcccctcgcgccgcgtccaacacttggatcatccgcgacttcgctccgcgcttcctcccgttgtctacctctacgctaaatcgatccaggaatcgaccccgcccgcccacttgcctaaccgatcagcccgcctagcctaagagcggcgagagctagttggcgccgggcatgaggctataataaacggtggtcacgaacttctgcttgtagcggttggtgatgcccagcaccatcataccgtccttgattgctgtgcagtaaagatggttgagcgccacgtgctgcggcacaggcagcaatcggccatcgacagtcggcggcgcctggaatgacacaacacagacgcaaaaacacgcgggtcagcaccagcaacacaactcccggaggcaccgcatgttgcttaccttgttcaagataatgtgccgcaagtgcggcgggagcgggggcggctccttggtgtactcgtcgatctcggggatgtaccgagagtacgggttctcggggtcttcgtcgtcgtcctgcggcttcttgccgtcaaagtcggacagcggcgcgaagtccgacacgtccacgtagttattaacgttgccttccacatctgccattgtgagctggtcgggcgcgaaccgccagtcgtcgtccaccacgaacttgtacatgtgcttcccccgcgtgaggttggcgatgtacgtgaagtcgttaccggacctgtgcatggggcactgcttgtcccagccgttgaacgtgcccgtgatgaacacgttgcgtccgccgtgctcccacttgaacaccatgggcacgacgtcctccccgggcgggacagtcaagtccgccgactgcgcgttgttccccttggcgagctcggcgtctttcacgtccagttgcgcggcgttgggcacctctccgtccatgtaggacatctccgaggaggactcggtgggcgggtccacctccatggcctccgaggcgctgtgctgggcgccgtagtactgctgctgctgacgcgggtgcttcccgtcgctgccatcgaagctgcgtccctgctgctgctgctgctgtccctgctgctgctggttgtggcccgcctggttgtagtacgggtggtggtgcagcgggaacgcgttggggtcgttcgggtctgcgcccaagttcttggggttggcgtcgccggctttgctgctggcgctgcccatcgtgccggacgctgcggctcgtgctgctgctgctgcttgctctccctcgcggctcgagaagacggcgctcccggtcgtagtctactgcgcggcggtaaggaggaggagggtcaggaggggctgggctgcactcgggcgcgggctgcttgggctcgcgtcgcgtgcgcttctctgccggcggagcggagctcgggctcggcgttctctattgcaaaaagacaccgacagctcaagcgcgagcctcaacggcgacgcatcatcgcaactgccgccgctccgaccgaccattttataccctgtcttatccgtttggctacagcataaaagtacgtgttttcaacatgtattactcgattccacgacgtatcgcatctgataccgtacgacttatctcgaagcggacattaccgtgacaggaagaaagttgacagaaggtcaaggttgggcattgcagtggagtcatcatgtagtggatgtgtatggaagtcgtacatgtattgccagtctataagtcggggtcgatgtcttgcgccgcgttcacggccacgggctgcatgctctggcgcagcgacgactgcaaggtaaacgtgggcttggcggccgcgaacgtgaacgtcgccggctgcatgaacgccggtgctgctgccgcctgcgccgctgcctgcgccttctgctgctcctcgtcgccgtcgtcgagcacagcaaatacgttgctgccgcggtactctggctgcacgggcttggactgccgggccgcctggttcgggttcactgccggtgcatccttcggggcctccagcgcaggcatgaagccgtgaaagccttccacttcgcgcggagcgggcgtcggctgcccagggttcgagttgctgccacagcaagaaaataaacgcaaaacaaacaccagcattagagtgcaatgcaggcgcgcataacaataacaggagtacatggcactcacaactggaaggtcggagcagccatgacgaacgtgggaggagccaccgcagcagccttgggcactacaccgggttttcgagtgctcttcgccgccatgcgctcgtcaaagttgcggaactcgtcggacacgggcgccgggcgcttggccacctttgccttccgcttgctgctgtgcgggtcgttcttgtctgcggctaccacgccagccctgtcggcggtgcaacagtacagtcagcatctagcagtcctagcgcaatgcaattcagtcgccagctccgatccacgcacctcttctcctgcttcttgagcgccttgaacatgccagccttcttgggcttgctgccgccggccttcttgccggcattgcccttgggcttcgagcctgcgtccaccaccgccagcacagcatcatcacgagtcagtacactgccatgtgagcctgcgccacgatccgtcgctgtcgtgcggccgccctcgtcgtcacgcacctccgctcttcttggccatggctttcggaatgccagtcgtcgtctcacgtctcatagcgcacgtatacaaatgtatacattatccggtagtatgtatacacaacaagctcataatcacttccgaccttcgcgcttgatggacgactcgcgcgggcgacgcgcctcgcaacaaggctattacgtcccgctggcaccgagacgagcaccagcggcgaccactgctgctgctgctgctgctgctggagatgccgtaatggcgtttacacctcagccagcgatgctgccgtcgtcgagctccatagaggcgacactgagcgcattcaacaggagcatcgcaatgaggctcatggcaccacaacaggcgcagcagttgcaacacccaacgcagtcaaagaagcagccgaagccgttgctgcgacggatacaggagccgccgccagaagagtttccaccgccactggccccgccgacaattgagacggcaattcgtccgactatcagcaggaagcggcagcgagaagatgaggacaacacagcagcagtaaccccaaaactgaaggatgttgcagatgatgaagacaagagtgcgcacgtgctgatgcccaatttgggcggggcgaagttaacctgtcgcctctgcagcaagcgcgggctcaagacgcggtcgcgctacggctgcgtccagtgtcgtctgggcttccacgtcgcgtgttttgctgtgttccaccacccgaccaagtttgcctccaatccttcgaccacggttcaagacgcgctagatgcgctggaccacaagtccgcctccagaccgaccacgcgccgacgcgcgaacaacagtatcaattcgttcgagcagctcactctgccctcattgtccgacgggcaggacggtctccaggacgttgagttataaacccgatggatttactgacaagtgtagcccacgtcatagcatgaagctaattgcgatgcgagagctcctagacttaagatgtaggagcctcatacatgactgtaagagctcagagttcacccaactcatgtatacatatcaccaaaacgcattatccgtgtatacaccatctggttttatgaccttatggcgcccgtacgacgccacttcagcattcgcgagccaagcacgccgccccgcacccaaacagcctcctgcgtagtacgtatccactcgtcgagcatggcggccgcggaccagagcatgagcctcatggacggcacgtacttcgtggggcgcaaggagatcctggactggatcaacggcctgtgcgccatcaacctggccaaggtggagcagacgtgcacgggcgccgtggcgtgccagatcctggacgccatgtacccgggcaaggtgcagatgagcaaggtggactggtcggccaacaaggactacgagtacatccagaactacaaggtgctgcagaaggccttcatgcagctcaagatcgacaagcacgtcgaggtggaccgcctcgtgcgcggcaagtaccaggacaacctcgagttcatgcagtggttcaaggccttctacgagcgcaacgcctcgggccagccctacgaccccatcgcgcagcgcgagaagggcaagggcggcgcgcagttcacacagaagttcggcggcggcgcggcggcgtcctcggcccccgcggcgcccgcgcgccggaaagtaggcgccactaccaccgccacgtccagggtcggtaggacgccgccgggcgcgcccacgagtgtgggggctgcgcgtacagcgaggacgtcgacgggcgcgtcgcgtcgccctacggggagtgcgggatccagtgctggcgctgctactgctactgctactgctactgcagcctctgctggagtgtccgcggcggatgtggaagcggcagtgagtgcggccacggcgccgctggagaaggagctggaggagctgacggccaacaacgaggcgctgacgaacgagagcggcgagctgcgcgcgatggtgcgtagtcagtctagagccaggaggtggttgaggtggagcggttgttcacgatgggttgtgtgtgctcgcaacaggtcgagagcttggagaaggagcgcgacttctacttcaacaagctgcgcgaggtggagatcatgctgcagggagcagaggacagcgagacgaacccgttggcacaggcgatcttcaaggtgctctacgcgacggaggaggaaggagtcgaagaggagcagatggcgggcgagccgcaggacgagcagatgtagagcacccaactcgcgacgcaaatgaagaagagcgagaacgctgcactttgagtgcagtgcaggcacgctcggtaagccacatcagaggcggacgattgaagaagattggaagccaggccatcggatcggcagagcgtaggtctgcacgcaaggtgccggtaaggactacacgaatgaaagcgtgttatttgaggtgtgggtgtgtggtctttcctgttgctcctttttggctacaggtcatcaatgcattcctacagtagaagctggagatcgacaaggattaacagtgtccaccagggactatcggctcctctgtgatcggcgtctcaggtgctgatgtcggcacggttgttggtgtcagaggggtctccgtggaagtcggcgatgatgtttcaagtgtggcagtggcagtcggtgcttcagtcgaagttggcggattggcgacagcattgctcgttgcaagtggcgtttgcttggtagctggagtctcggctggtgtcttggtcgctcctggtacgggcgctgtcgttttgagtgccgcggatggtgcactggtgactggctgcggcgtactggttgacgctgggaggtcagttggcaaaggagttagcggctcaggagttgcaggcgatggtgcagtggtcggcgttgaggtctcggtcggagtctgcgttggtagtggcgtcgccgtggaaatcggtgcatccgtcgcaattgtgggcaagggggtctccgtcgacactggtgcttctgtcgtagtagctggaggtgctgagggtgtctccgtggacactggtgcaggcgtaggtagtggggtctctgtgggcacaggtgcctctgtcgtagccgaaggtgctgaggttgcgttggagtcagtggcgttggccgtgcagaccatcttgagacccgagcactcttggtcttccagcgcgcactcggtaacggggagtcgagcgacacagagcatccagcacacatcggcctgcgtggtggttccagtgcagtcgcacttcttctcgcacttggcgtcgaagaactcggtgtggtagttgcacgcttggttgcagcccaccgtgggcggcttctccactccgggcttcagtgtgcagatcgagtacgtgcagcttccctccgactccaccaagtggcggccgccagcgcatccgatggctttgatgtcgtcctttgagcttccaagcaggtggcgagtggtgcggttcgtgaactcgtcgaagtccatcttggactcgagcagacgctggtacgagggcagcagcgtcattttaccgaaccacgcgcgcaggttacgctgtcccggagtcgcttcagcgtcccataccatttcttcgggcattcgcataccgtgcatgacggccggcaggtggtggctggactccagccagcgcgacgcgccggtgcctatcatgatgacaagttcgtcgggctttagctcggggcgaacgatttcgtcgagctcggctgctccgatcaccagccccgaggcgtcagacttcaggcggcgctcacgaatgttcccgttttcagcgttgacggagaagaacttgggcgctgccatggcgatgaagaggccgtggtcttcgtgcatggccaaggacaagtcccgctcgatctcctcggccgaaagggaccggcgcgtggagctcggaggggctgcagccgcctcgtacgcgtggaaatggtcgagtcgcttggcgtctccaatgagcttgcgagcgctgatgtgacgctcgccgtcacccatagtgaagtcggtcctgtccagtgccgaggcgaaggtgtccaccgctcgctccaacatgctgctgaattcttcgtggagttcgcggtggcctggacagttggcctccatggctttcagtgactcggcgttggtgtccatcagctcacgaccggcagcagctcgcagcgttaggcggcgcgtgccgtcatggaaccgcttggttgacaggtagcgaatgccctcgtcgtcatgttcggaagccacggcgcattgcactgcgctagtcaggtagcgctcgcgggtgttggcgtagttggggacgttcttgagtgcgatgatgccgccacgttccagagcttgaagcattcgggtcggcgcgtcaccgtcatacagtgactcgtagttgaacgatggcacagcgaagctcggcacgtcttccagtgcagcgtcagagatcaccgcgactgcggaagcccaggcaaaggcgagcttgattccgctgagcatggtcaatcaaggtgcacttgagtgatgaggttgttgcttgaggcggacaaatgcgaaatggacaagtgaagtggagactggagcccacagcaccttgagggcaatgagagcagacctcggggatgcatggtcatgtcatgtaatcaactcaggcaagtcaacgggtggcgggcgggtgtgctacagccttgcccttggttagtctgcagcgtgaagggcaacacacgccctcggacagtgggaatagatggcttcaccatcgcggacactgcaacacgaaagcaattgttgaatgggaagagtacacttcaagtacctgtgccgaacacgaaacctttgatcacatcactgtaggtgacgcaggtgcaacgccgatcagctcgttgacagcagattctggtgggtcgagctcgtggtttgacctcaacctgaacaacgttcgctaacagagttcgctaatgaattgataagagacggatcccttgtgcttagttttcctatcggtggagtatgagtgggtagttttctgcctggtgaagagtcctcggcgacgaaactgctcaatgtttctgctaagttattaagctctcagaagacaaagagcttgttggtatcatgcccagcgagagcaagacgagcgccgactcgaaggacgagaaacacgccggcgggtcgagcgagtccaaagctcatggtggccacgcaaaggccggcgccaaggacgacgacggcagcagcttcgacccggacaacaacgacctggtgaacaaggtcatctccttcttcttcgacaacgacgagttcgcgcacacgttcgagacgttcgcagagacccactgccacgccttcgacctcgacagcgacgagatgaagctcgagtgcgtcgaaaccataaaacctttacttgttcttgctgcttgaagctaagcttttggttgtgtgtcgttgcaggtacacggacatctacaacgagttcctcgctctgttcgaggagaagctcgaaggtaaataaccgagaactcttccgcccttcgtgacgcattgcagtagcttatccagcttatctgtgcttttgtcagcgtacatccgatcgcagggagcaaccgtgcacgagttctacgagctggtgcgtcgagcgtatgagctcgaccgacaatcaggcaccgtgctttgctcggagattctggtggccacggccgacttcgacgtgttcgtgctcatgatgcgccaaacgaaagaggcggcgctgctggccaaacgttgaagaagttcgctctatagtctgcactataacgtgaagaatcctccgtaagaattcaacgatcgtcatcgctcagccatcgtttgtctccgtagccgctctaccaacgacggcagcttcactttcggcttcttcttctggctgcttgtcgatgaccacgacaccgtgttggtcgctaccttctgcgtatgactgctctggttgctattacttgcatgaccgttctggttcgaagcggtgggcttgcggttaagcagcttctgcactcggtaggaaggatcttgctgacgctttcgctcttgttgggcgtgttgctgccgctgcttcgcacgcttcatcttgttccacagcgtggctgccaggttctgctcctttggagggttcttgttgtgcggaggagttaatacacgtttacaactctccaaacgagtggcggctttatcgtccgcttcgttgttatcagcgtgctctggcctttgatcctcttcatcaccagcacatggaggcggtatatactgcctttgctccaacgctaacgcaggtggcaggacggggtcctcccagccatcaacgagctcgggtgggagctgaatgaggtcgtccaaatttacagcgtcaaaagtgtcgccctcttcaggccccgccacgacctgggcgagtgcgatcgcgtttgcaaacttccgtctcacatgaaacccacggaatgtcgactgcagccggagtgctgcctcctgactctcggcagagttggtgtattcaccaggctcaagtccttcgttgtcgtcctctgcgtcctcaacctgtggctgctcatcgtcgtcgctgaaatcctcgaggacaagaggaatttctacgtgatcaagttcctctcgtctccttcggcatgatcgatgccacaactgaatcaccgtcgccgcattctcaacagccatggatcggactcgatcttcctcgacgcattgcgcgtgccactgcttccacttttcaagacctgaaactagtttgtgctgctggaaaacacgatcaatgccttgaataccagccgaggtattcgccaaaacgtgaagtcgttggagttcacgttggctttccctctccattgctgctgcttcttcaagtttaaccagatatgcccacgcacttcgactgcgctcttcctcttgcctcattgatattcgacagcgctcttcattctgccttcgctcgcgttccaaggcctcgatgaaagtccacgcagagcgacaccgcctctcttccttctccatacaactacgatactcttgttcgcgcaaccgctcctgaacttgcagctctcgagcccgctcaatgtcttccagtgctcttgcaagctcatcttcaagtagcattaacgctcggttttgttcacgaacttgtagctcgcgttgtgcaagagtctcagcaattattcggcgcgtgaaggcctcttcagctcgcatctgtacacactcgcgacgctcacgctttgaatgctggtcccgaagttgactctggacttggtgatattttaccagctccgacaacacggcaccgaactgacaccgagccaaagtatcttgcttctgctgttgtaattgacgttcgagttgcattctttgcctctcagcctgatcctcaatcgtcatcatggctacctcccggcagattgactgctgtacccgcgctaattccatggtgaaagttcgtgattcttcgtcagcgaggaccataagcgcagtctcatgaaattcccgcatagctgaagcatacaatcgactacgaagttcttcgttagtcattaatgatcgctccagcgattcttttcgtgctgcctcggcacccttctcttgggcctcgaactcctcttggagttgcctcaggaaacttgctgcttcgtcgcgttccttctgctgtcgagcctgaatcttcaaacggcgcgattcacgtgctgcgtgctgctttgcgattgcgtcaagctcattctgccttgcactatcatccaccgggcgctgctcttcagcgtcaatgggctcgtcggcgtcaatgggtattgtgttgtgcttaccaggtgatggtgaaaggacgacagcaatcgcaatcgaagtgctgtttgaggagtttgacgggtgatctactgaaacaggctcggaatcggtaggtgttgcttcaacactatccgttatctgctccacagtgctatccgtcacgggtttggacgcaatcggctccttcttctcctggacggtgggtcggtcctgaatttctccaacatcggtggacagctttgaagattcctggttgctgtcatcgggtactggtggaatggtttgttccagcaatgaaccttcaatatcacgacttgtgtaatctgcctcctcgtcggatatttgagagtggtgggtattttcttctggggtcgcttgctgtggggactttgcatcgagaatcgttgtgcgaatatcgtccagattttcatgaattggctgaaagaactcacgatcaacacgctcgacgccctgaagcaaaagttcccatgcagatggtagaattggctggcctggtttggaatcgttatcccccggttcacagctgtgggcgtgcagctcgtccgctgaagcttcagtcacttgctgcaacactttatcgaggtccaaacgcacatattccatcgcgatttcgccgcctctagtcatccagcccgcattttcatctccctcgtcatcgccaccgctatcacattcatcaaacccgacatcttgggcggataatgacgccaattcctctgcgagttctcgttcaagtgctcgacgctcatcatcgtcgtcgtcgccctgactggaagccgccatcgttcaagctgcaatattacgatggtacttatcgcaactcggtgatgcgcgcactacgcgctgcccattgtattgagcaagcaaggcagcgaactcgcgtagtggtattgcactaccgctcctctatttatacgggaattcatgttcataaatatcgtctagtgctcttcttgctccacaacttccatcagttctacttcttcatcttcttcttcgtcttcatcctctacctcttcgttttcttcttcattgttgttgtccgtggcatcccccaccgtggccacaaagccttggcgcgcgcacaatgcgatcgtgatggcatggaatccgtcgcaggtgatgaagttttcctgcagcttcagcgtgcgcagtccggcaagccccaagacattgaagtgctcagccacgcgctcgtcttcagacgaggccttccagtccccctccatgtcgtcgcagaagcccaagtctgtcacaggatcgtcgagcaaatctgcgagcgccagcgcgtccgtgtcggtcaggatgttgcggctcaggtccagcacctgcagctcgtcgaatgactcgatggcctcgagcagcgcgcggcaaccggtctcgcccatgaagttgttgcgcaccgtgagcgtctgcaggtgctggaagaacgcgtctcgcctgtccaacagatccgcgagctgctcaaggcctcgatcgcctaggaacgtcgcgtcgagcaccaagtgcttcagaggcttccgcgttccttggtacaccttcggcttggccagagccttcagcaccagaaacactccgtcactctcagcggcgaagtcgaacggggcgagcagctccagtcgctccaatgaggtgcacgcgccttcgtccaaagctttcgccacttcgcgcaccaactggtgaccgtacgacgtcggggcgagcgaggccatgtatgtcgccgccgtcaacgcgcgcgggaacacgacgccggccttgaggtgcgtctggttggcttggttcgagatcgtgaggctcgtgagggtcttgcactcgtgcagcagcgtgctcagcccagtcgccgcaccgtcgccgcggttccgagtctcggcgacggaagcgctcgacgcatcgatgtgcagcgtgcgcacgaacgacggcgcgtgcaggtacaggaacttgttgacgccgcggcagcgcagcacgtccttgccgtccaggaagctgcagacctggtgcagcaggtccaagttgctattgagcacgcagcctcgggcgccgacgctgcagttgcggatctcgtcctccgagatcgagagccgcgcggggcgctggcgcttggcggcggaggcgcggatggccgccatgacctcctcgctggggtcggtctgcgcgcgcttgcgcttgtagtgggtcacgaggccctgcacgcggcgctcgagcgactgctggtgcaggtactcggccagcgacccggccgaatggtagagcatccactcgaggcgctgcagcagcgacggactcgcgcccgtgtcctcgcgcgcctgcaggatcgggtggtgcagcgccagcgccgggtggttgcgcagtcgcgccatcatgagcttgcggacctgcacgtcggtcgggtcgtgccacgcgggggtcgtggtgaagacggaagcctcggacggagcggagaccatgggcacagagaggtggcggttattgcattgatgcggtcgagttgggcgtggatccagtcgggacttgcgccggggtcggctggttgcgaaatggtccgagggcacgagagctcgggagtcaaagtcgcggttgacgcggatgatgatgtggactggaacacacttctacgagccctggggagagccgggctcctgggctcttgggtgaacccaaaaagtcgcggcctcctgggctcttgagttcaataggttaagtgaaaggagccctccagaactgtgagccctcgttaggctccccccctcacctgtgttaaatatctcgctgatgattggccgtcattgaagtatctccaggttctagcctgaaaaggcataggaaagagggcttctccttgaggggaaggaaggacgatcggcgacgctggggtggcctcggagcggctgtacacatatgagcggcgcgagatcttctagtgtggtgatctttgagctcgatcttctagcgtggcgcatcgatcacgcgaagttgctcgccttaagtctaggtaaaattggccaatcagatattactatgaagagcccatcataaatttgaagctaaatttggggagccctggaggggagccaatggggagcccgaaccatggctccttgatctcgtacttaccatgaggcagcccattttgtgcgacttttggctctcgtattagggggagcccacttttgaagttgacgggctcgggctcgtagaaggtgtggactggaatacggaccgggtaaaagaaaccagacgatggtgcgattagtgcattttttcgagttagcgacggttaccgcaatagagagggatcacttggagcaggtaagaagatacttttgatagaagaggcaatattaaactcttatccatattttttcatactgttgatatttcatctattttccacggtgtaaccatcatcaaagtactgtatcaggataaagagagataatcatgctagacgtgtcttctgaagcgcaagagcgcctgctttgagtcagcagcagtccttttccaagcagcttgcctagcttcgcctgctggcggctaccagccagtgccgcctgcatcagaagagatggcttcggcaaatttgtccgctcctggttggtacccatgtgctgcaatggcttcgctccgaggacaacagacataacagttcgagcaatggctggctccggtgccatggtacttctgaagatactttctcgtgattaaattttgggcatcggtggtgagtgagctgataaaccagcaccgttcgcgctctctccgaatcgacagcgtagattttcgccaacgtttcagaatcctccgggacgccgagatatctcgcacctctgctggttggactcctctcaaaagggcgggtggcagcagtgagttatcactagattacagtcttacaacaataacaggatatcctgctcctcgtggtttgcatgaaggtaaaggtgccagagaatgtcactgtatcaacaggcccaaaccgagcgcgtattcatccgccactccgatcgagccgaagagttgtacagtatcgcaagcacgtgggtggaccaccacgcgatctcctcgtcgcaggattccactggagcggaggcacattcagtgcctcgggatttgactgggagacatttgacaccgcgtttctctgattcctagccgcaatcgactttaatcagtcgccggtgcccgaggcataagcaccgtccgcaaacggaggaattcagctgaaaaagtgtgctgaagagcggcaaaaaagaataaagtaaaatgttgagtaaaatgttctactggatattttccatttggatttgtgtatctctggaatcgaatacacagagatatttcccagtctatctaaaccactgcctatcgataccgtgtagctatatgccctgttgaagtcgatgcagcgcaatcgcatttagcaggggagcttcgcataccgtgcgtttttctcgccaatcgcggctagcatcccactgttgtcaagcccacgaacgttgcgatcgttgctgcactggcatcgtgttgacggtctctttacactcggctactggctgtcgaatacagtgcctacagtactgtaccggtatgctacacgcggcctcacgacgggatcaatcgcgcgttgagcgccgtggaaagcgcctcaagcccctcctggccgatgaagttgtcctgcagcagcagcgtgcgcagctggacggcgggagactcggcctcgcagcccagcgcgatgggattacccggcgccttaagcaattgctctgcgcggctcgatatccagtctgcgagcgcgagtgcgtccaaatcggtgaggatgttgccgctcacgtccagcacgcgcagcgctggtaaacactgcagcatgcgcagcagcgcctggcagccggcctcgccgatgaagttgttgcggagcaccagcgtcttcaacgagccgaagcaattgacgcagcggcgcgagcggtctgcaacctgctcgaagacacccgccaggcggctcaggcgtgcgtcgcccaggtaggtcgagtcgaggcgcaggtactggagcggcccggcgccatcgaccgctcctcttcgagttggcttccctgtcgcgaaggcctccaggcatctcagcacgtcgtcgctctcggcgaagtagtcgagcggcgagccgaggtccagctcctccagctccgggcacgcgccctgctcgaatgcctgcgtgatgtctcgcagcaagagctcgcctgccacgactcggttggcgggtttggtaccgtaccgatgagttggacggctgaacgagggtcgacgatgcaccatggtccgcgtggtccgtctgacgggctcgtctacctcgacgcagacatcgtaatcccgcagcttgctcgtcaccacgaggctggtgagcttgctgcagcggagcagcaaggccgtcagtgttccgctcgagaaatgctgcagagctggcgagtgcgtttcgagatgcagcgtactcaccatcttgggcgcgttttcggccaggaaccggttcacggagcgaagctggagcacggttcggccggacaggaagctcagcacgagccccacgaggttgtcgtcgttctccagcataaagacgcttctgtcgcgtagagacctgctggtgtcctgtatccgctggcgcttcttgtcacccttggtgatacggacatcccgacctcgtttgctgccctgctgctgcttctgctcggtgacgaccttgggctcgagctgcgtgacgagcgcctgcactcggcgctccagggactgctcgtgtgtgtactcatgcatcgagtgggcggcgttgtagagcatccactcgagccgctgcacgagcgagggcaccgcgacggagctgccgttgcttgcggcgctggcggtgcacttggtccctgcgagcaccgggtgcagtctccgcagccgcagcatcatgagcttgcgcgtgagtcggtcgtccgcattgttgtgccacgaccgtcctcgaggaatggagcgcgccagcacgcgcgctgctgcagggctggaagacgacgacgaaggagacggaggagtggggggcattcatgcagagcctcgatggggcgacttggcgggctcccggtcgattcgggaatgggcaccatcaacgttggtgacggccgtgggccccgagcttcgtcgtcatcaccgttcgggccggtgggtggaaaactagtcccgaggcgcaggtggcggcatcccagaatccggtacgcgttgcatcgataggccccaatgtacccacggccacggcatttcgacttcgaagcaagcgcaaagcgcgcggatcgcctgatagcttcactgaaagcattcgttggtcgttagtcctaccctgtagctgcattgtacctcagcaccgttctttcgaggcctatggggcgtgtacggacggagttgccgcgatgatgcgagttggatcgcggcgatggcttgagattgagttgagattgagacgttgatggtgctcgctcgcggatgcagagagcgtgaggttgaacacctagttgcagcaaggatttttcgggcataacacgtcatgagctcagcaatagcaaactccgtgccggtgccacgtgggaagttgcggagcccttggctccaggcgcgcgctccgggcgctgatgtgatcagtgctccgactacgcctgactgagctgtaagccagcgtggatacgtggtattgcaaatgtacctccttaaaacggcatggctacaacttgaccacgttgcagtgcattcatcacacgacaagaatcgcagtcggagccaccctggatggccagccaagctgtgccagggtgggttggtggctttgagttgtcgtacacgtgtatagcatggtaacctccggggccctgaggtctcagcctgagactctcaggtcacgcacgcatcgcagcatcggagaccgacaataccaccaacaccaacaatgttgtcgcgatacccttggtctgcgcagcgcagcaccgtccaaattgaacccagcgatctaatcggcgatggggccgagtactgtgcggtcagtcgaagtgtatcctaggcctaagcgatcgaagatacgcaggtcattacgcgctcggccatcgcccgcactcgtctgttgcttcctctgttcgaaggcatcgcgcacggcctgcaatgatcacacacctgctatattattagttgagtatgggtgacgagccactgcgctctctgcgcgatggaggagcgccacgaatgaccgccaccctgtagcctagcttagccttacttcttccacgtcgtcgaccggcgctgcttcttggcgggcggcggcgacgcgaacttcgccagccgctgcagacccgtcttcttgctgcccgagggagacgccgtggaaccgccgggcttcttgaggaacgggttcgccggcgccacggaccgctccacgcgtgcagcggcggtggaactgctggtcttgctccggcttgaggccttcggagatcccggcgcctggtcctcctgcgttccgtcagcggaggccgcgtcctcggtgtcgtgctgctcgtcttcgcggggcgacgaggccggcggtcgcgacagaatgctgcgcgcacgacggagcggttccacttctcgtgactcgggagcgtcctcctcctggaaggtagagcggtacgaggctgttggctgccggcgcggctgcgaggcggcctgcatctgcatcgccgcctcctgctccagccgcttcggctcttcgaacttgacgcggtagagctcgtagagctgcgactgcagctggcgcagttggaagtggatggcgagcttctgcgcaatctggtgcgacttctccaggtgcaggcacttggccaggtccagcacgcgcgcaggctcgtcgttcgagcacgccatcttcatcatcaggatcagcgccttgtctatctcggcctgttcgtgcacgacttggtccgcgacttggtcggcgttcatctcgttggcgatagcctccagcccacacagacgcacgttctgccacatgtggccattggacgcgtcctcgttcttctttgacgtcttcgggaaggacgccgtgcgcagggggaaggtgccgggcacggggcggtggttgccgcgcagcttgggggcccgagctcccttctccagcgggaagtacagcagcgagtcgttgacgacgcccagcgtgaacacgccgtgacggtcttcgggcttcttctgcagcgcattgcccacgcagccgatcgggaaccagctccagcccgtgctgggcgacagcgcctgcacgcacgagaacgagtccacagcgtacaggatctggcgatcgtcgaagccgagccacgtgagcttggaccagttcgacgggtcttcccgggtcatctcgttctccttgtgtgacgcgaagacatcgcgtggtgggggcgtcatgggcagatcgcccttcgagaccagcacgacgcgctcgcgggacgagtccacctggatgcggaggagctggtagagcatctgcccgtgtagaccctggtacacgacggccagaagagattccttcgctgtcatggtcacgacgcggccaggaagacgtagcagcgcgtagtcgatgccactggttgtgtaaatgcgcagagtctgcagcgaggtggccactgcgcagaactcacggccagcggcaacgcactcggcgtcctccccctcgggcaaggtcttgtgccacgagctgttgctggcccaggactcgaacgggcggtagaacacgaagctgctgataacgtcgctctcgctcgagcctgcctcgaggtcctcccagtcttcacgagcacgtcgaggcacggcaaacacggcgccatagtcgtccaggaaggccatggagaacatgtagttgtcgttgaacttgaacccacgtcgagacttgtcggtgaactcaaccttcaccaggttctcgctcatgctcgctccgcggatcacctcgatctctccttccggcgtccacgccagcagcgacgtcgcactgctgctccgtccagtggggtccattacgctacccggctggaagggctccgtgactgtgcgcagcggagatacctcctgccccgaggacttggaagtagtcccagcagacatcgagacgtcctcgtcttcaacctggtcgtcattggcagcgttcgcagccgcaccaaagccaaagctggccttgatggcctccacgcgcgcctcgttgtcgtcatcgaagctcacctcctcttcgtcctcatcatcgtgcttgccgtccacttcagcctcgtcctccacaaacgccgacgccttcaagctcttcttacgcagctgcgaggaattgaccggtgcagtagttgcagccgtagtcggcaagccaaccgtgtgttgcggcggcgtgtgtcccgcggggatcacgtctttcacgaacgccagcttgccgcccgtgtgataaatcactagcgcgttgctcttgttggcgaactgcactcccagtgccgggtagtcgatcttgaacgagcgcagcacagtctgcgtctccagctcccacacaaacacctccttcgcgcacgtggcagcggccaggtactgtccgttaggcgagaaggacaagatatccacatcggccgcggtgctcctgccaatggggagcatcaacctgcccttggacgaccacgtatccctctcgaacagctcgacaatgcccttgtccatgggcaccgccagcaacttgcgattgtctccgggctgccacgcacagcgcagcagcacgtcgtcgtgcctaatgtctccgtgcttgatgctgaagcgcttggcctccgtggcccgctgcgccgccacgtccagcgcgaagacgcgcaccgtcgcgtcctcgctgctggcgcacagatacttctcctgcgggtccagcaccacgctcttgatggcgcccgtggccccctcagccaggatcacctgctccgtgttgcttcgcagcagcacgcgcaccacgggctcctcgtccgcgatggccacgaactgcgtcgagcacgcgacctggcggatggagacggtggagcggcgcagcaactggtccagctggcagtcgggcggcaggctgtaggacgccacgttgctgtcgtcgtcggacacgatgagcacatggctctgctcgggcgtcacggcgaaggacggcacgaagccctcgcacacctcggcctggtacacggagctctcggcggccaggtccgtcacgtacagcacgccgtcctcgccgctcgtgaacacgacgtcgcggcccgcgggcacctgcccgtccttcatggcgcgcagggttgtcaccagctgcatggcgcccttgccgttcacgttcacggcgatctccttcatcgtctccatggtcggcgacaagctcaaggtgagtgaatgactctcgtgcgtacttagtccaaaattggcgggcttcccgccaaatcccgataagttcgcaatagttttgcaaacatacacattactgttgcgggaagtgtagcagttcaactttgttttttgcagcgtcagtccgtgatggagagctcagtgcgagattgggagccaaggcgattgagaccttcgcactccccctgcggcttgacgtgacgagagatggctcgcaaccaggtctccagacgcccgaggcggcgcgacaagcagctcgcagcagcacaagccaagaagctcgaggcctcagctcaagacgctacgcgagagaaggaggtcgggatgctgccgcgcctcctcgtgcgcatgggcgtcatcgcggtcatcatcgcgctggttgtgaccatgatgagtctgggcgcgacgcagacgaaggaagagacgccagctcctgcgccgaagcgcaacttgagtccgtccgaggaagcgcgcgtcaaggcgcgagtcgagcgccgagcggcggcgcggccgacggtcgatgtgctgaccaagtacccgcacgacacgacggccttcacgcagggcttcacggtggtgaaccgcggccacgacaagatcttcattgagtcgacggggctgaacggagagtcgagcgtgcgccatgtggacattgagagcggcaaggtgctgaagcagtacaatttgcctcaggagctcttcggtgaaggcgtcacggcggggcccaatgacgagctggtcatgctaacgtggaagagcaagaccggcctggtgttcgacctggacgtggcggctgacagcaacgacgacggcttcacgttgaagcgcgagttcacgttcgacacggtcacgggcgaaggctggggcatcacgtacgacggcgagaagttcgtcgtctcggacggctcgtcaacgctcatgttcttggacccgaagacgatggaggaggtgcgcagtgtcgacgtcaccatgtacgacggcgcgcagaagatctcgcagatcaacgagctcgagttcgccaagggcttcatctacgcgaacgtgtggtaccacccgtacgtgcttaagatcgacccggagaccggcggcatcgtcaccatgttcgacttgtccaagctcgtggcggacgtcggcgtggacgtgatgtccggcgccgtgctcaacggcatcgcctatgacgacgcggaagacgtcttctacgtcacgggcaagctctggggtgccgtctacaaggtgcgtctcgtggaccctgtgcagtagctggcaacaaccacaaatcaaagaaacacaatagagtgcactcactgtacgtaaagaagcaccatgagcaacacacacacacagcacaaatacggatcttgggtgttttaatctctgctgcagcttgaaattccgacactgttcctacccctcctgctgcaggaacgggttgggaatctcggccgtgccgtccacgggggagacgagcatgaccgacgtgcctctgcacaccacgaggccgaccttgcgcgtgtcgtccgtgatgcggtactcgtcgttcgggtcgcgcaggaactcgacgcagtcgtccagcacgaggttcaccagctggtcgtagcccttgagcgtgcccgtgacctcgcggccgccgtggaacttgacgcgcacctcctggtcgatgtacttggccaggtccaggatcgggtccttgcggctgccgccgccgctcgcgccgttcgccgccatcgtctctttacaggcgaattctatgggaatggctgctcgacgcgccgattggccgaaagttgcacgcgcatcagaccgaatcagacagatccatcgatcatgagcttgagcttcgcggcggacgagcgcgtgctggaggccgtggcgcagaccagcgcgctgtcggcggagagtaagagctccaatgtgtgggcaatagactggcgatgggttggtgcgtgtggctcattgcgttgcgtggctgggggcagatttcgcggcggtgtgcaagctggcggtgcggcttttcggctcggagaagcagagcaagcggcggctgacgcgcacggcctgtaagtgcaattgatatagttaatgctagcctcctacatgtacgcagtgctgatatactgccgcttcttgtttgcagcggcgtccggatgggagactgagcaggtggaacaggcggtgctcgccatcgcgaagattctcatggatggcgccaaggtgggagcaaagcgtggatgcagttgaagatgaggtgttgtcattgaacgttaaggtgctgggaaatgtttattgcaggcggaattgtccgagcaagcgttccggatggtgctgaaggggatgacgctgccggagcaacacgttgaagtccttgcgcaggtttgcatttgctggtctaccccgccactgcggtcacaattcaggcgactgaacgccgtgcgatgtctccttagatatacgaggcgcacgcgaaagacattcgagagtgcgtgtccagggaaacacgaaccagcgtgccccactatcgcaacttggagtggcgaatcgacctcgaggtaagcttttggtgggcatggcaattagagagtaaatgttctcatccgcgttacgacagctcggcacgcgcttccaccgcaacaaaccaaaacccattgtgacgcttcgcctggacactgcaacacaatccagcagctccagcgtgccccagcttcaatcgacgtgtcttcgcgtagactacgacggtctcaaactcatgcagcgccagctggagaccgcgttgaaagaggtcgactcggtgcactgcagccgcatccagcgatacatgcactgatacaaacacctactcagtgaagacaagtatgagcgacttcaacatcacaccaaattgctctcatttctccttgttccggtcggctagatactgctcctttgtcttggtgaaggccgtgacctggtccagctgctgcttggactcgctcgagatgccgtccttctgcagcagcagctcggcgaacttggcctgcttcttcttcctgctctccaggtccggcctgatcttcgactcctgcatcaagtagggcagtcagacccagccagtcccaccactcaactactgcagtccacactgccagctctcttctctccggtctcaggccccacgtaccacgtcgcgacggatctcctcgtccgacttcgggtcccagtacgcgtagcacagcccgatgggaatgccgaagcgcagcgagtagtcgatgagcatcttgggcaccttcatggccgctcgcagtgaggcgctgtatgcaaactccaagctaaaaatcgaacttaagccgcaccagccgcacatttcgacatcatcagcagcacagcataatgcgagcagctctgttagtggcgaggcagcttcagtgccgtgctctgcgggcttctgctgctcggcgcctgagctctgcagcggcttcactgcctgaaggtcttcgtgagatcagcagcgtcccgcgcacgccgtcctggtcgctgaaagagctgcaccaggagggagcagagctcaatgctgcggataccgtgctgacggaggagaaggtgcgcttaaagtggtttgcagtggctgtgcgagtgtatgggggttgacaatgagtgtctgtgatcagctgcgtgagctggcggagctgtgccacctgcacgtggaggacgagaagctccctggactgctcaaagacgtcgagtccattattcagtgcactaagaccattcaggccatgactctcaacgagaacatcgatgatgtgtacgcgaagagcgacttcgacgcgggtaaagttgtcgattaaagtgttgtatgtagtggatcgagttgtgggctaactgtttgagtcatggttgcaggtgttgtggctccgcttcgggaggatgtcgtcacggaaggaaactgcgcggagcaggtgctggcgaacgctgcagagaagtctggctactacttcaaggtgcccaaggtgctgcaggattagatgtttgcgcaaggcaacgacaacttaatagaggagagcgactgagcaccgtgctaggcaaaaatctatagtacttcaactactcgatgtaaatgcacaaggaaaacagcctcctcctccttcctatcccagaacactgtgcgttcgcacaacgcgcggagcctactagtaccagcgaaatcagtcgtccgccttgaagacgttggccttggccaagtactcctccaggtctgcaacgcaaacaccacacacaaccagttagtaccaggcttcaagaacacgtcaatgtaccggatgcacccaccttcgaccttcatatcgatgccgttgagcttgcggatgcccaggagctggttctgcagcgagcccttgtggtacatgaagagcgtggggcaattccgggccggccagttctcgatgcaggcctgcgcctggatgctcacgaacttgacgtcgcggtgcttcttggctacctcgcgcaacacgtggtccatgaccttgcactcctcgagggcctcgtcccagaggtaggcgatgacccagtggtcgttgctgccctccgtcacctccttggtccactcgtccttggcgatgggctgcacgtcgccgaacttgttgcgcgcggcctgcgccatcatctgctggatgcggcgctcgcggatgcgcgccagctcagcgtcgtcgtcgtagtcgtcctcgagctcgtccagctcgtccagcgtggcgttctcgcgcgggtccacctgctcttcctcctcgtggtcctcctcgtcgggcaccttggtcttgggcgcgaggatgcccttcttgatcaggatgtcctcccactcggtcgtctcgcccgtgggcgcgtagtacacgttgccgcggtcgcccatcgtcgtcgtcgtcggtctcttcgcctgtgtgtccgattccaaagtgacgtcgttcccttgggtatgtcctatatccccccataagtacgatcacacattttgccacgtttcgtcgtccacagtagcggcaggatccagagcctgagcctgtgagggacgatgggcgtgctgtggaacttcgtgctgacgagcctgctgctcacgaacgccgtgtgcatcctgcacgagaagcggttcctgcgtccgcgtacgtgctgcgattgattgtgggggtgaagtgcttagtgtaggagttggcaggttctgacgagttgatgtggtggttgtatggctatttgtgctgcagatggctggcacaaggtggactcgtcgcagggcatgaccatcaagaaccagatcgtgggcttcctcatcgccgtgcagtatctacgctgtacgtacgcttggaggtcgatatctggcggattggagaagtgctgacgttgttgtgttttgatgcagtcccgctcatgatcatcaacacgctgatgattctgctcgagttggtcatgggctaagagctgcctattaaccgtctaaacaagcccccagatgaatacaacacaagagttctttcatgtggacccccaatggcgttgcatccattatactgtatcgttgcatactacaccgctgccacatccactagctgtctccattcatatagtttccgtccacagcattccttgaaagcctcacccgcgggcagctagcgttaagacccgcatgaccgtcaatggcatgcgtggtatctcgcaaaagattttgcgggtcgaaacccgtttgcatacaaatcccgagtcaaattctgtcgacccgggtcgagccatgtcgtccccccccagcagcgatccgactttagctcttgattcgcatcgtcttgatccgtcgggaggcactccatcgtccgcctagctcgcctgccttgcccgcttcgctcagctcgccaccgccatgttcgagaagaacctgcaggacctggtgaagggcatccgctcggccaagggcgacgtgagcgtgtacatctcgcaggcgctgcaggagatcaaggccgagctgcgcagcaccgacccgttcgtcaaggcgcaggccgtgcgcaagctcacgtacctgcacatgctgggctacgacatgtgctgggccgcgttccacgtggtggaggtcatgagctacgagcgcttcgcgcacaagcgcatcggctacaacgcggcctgccagagcttcacgcagtccacggacgtggtgctgctgtgcaccaacctgctcaagaaggagttcggcagcacgagcgagtacgaggtggggctggccatcaacgtgatggccaacatcgtgaccacggaccttgcgcgcgacctgctgggcgacgtgctggccatgatgggctcgcccaagccgtacgtgcgcaagaaggccacgctcgtgctgtacaagatgttcctgcgctacccgcagggcctgcggctatccttcgaccgcctcaaggagcgcatggaggagcccgacgtcacggtcgtgtcgtgcgcggtcaacgtcatctgcgagctggccaacaagaagcccaagaactacctggggctggccccgcagttcttccgcctgctcaccacgtcctccaacaactggatgctcatcaaggtggtcaagttgttggccagcctcgtgcccgaggagccgcgcctcgcgcgcaagctgctggaccccctcgcgaccgtgattcagaacacgccggccaagtcgctgctctacgagtgcatcagcacggtcaccacggcgctgctgtacaccaagaagagcgacggctcgcagccgcgcaacgtggcggccgtcgtgaggctctgtaacgaccacctgcgccgctatattgaagacccggaccagaacctgcgctacctaggtctcgtgggcctcggcaacctcatgaagtcgcacccgtacgtggtcacggagcaccaggagctgatcgtcgagtgtctggcggtggacgatatcacgatccgcatgcgcgccctcgagctgctgtccggcatggtgaacccggacaatgcggcgccaattatccgcgagctgatgcgtcagacgctgagcgccgacggcgcgtaccgccacgagctcatcacgcacattctgcatgtgtgttcggtcaacaagtacgccaacatccacgacttcgactggtacatccacgtgctggtgcagctcgctcgcgtgccgggcaacactgctgcttcggttgacgcctcactgtcctcgctggccccgtcgtctggcagcatgctgggctctagcagtagcagtaaccacaaaatgaagccgacggacggcgagcctgcgaagcgctcgcacggtgtcgaggtggcgcgccagcttgtggatatcgcggttcgtgtcaagagtgtgcgtagcgttatggtggacaacatgattgagctgctaatggagaaggaggcgctcagtggccccggagcagggacgcttcaggaagtttactatgcggcggcgtggatcacgggcgagtacgtcatggagttcttggacgacgtggacgatgaagaggacgaagaggacgaggacgacgaacgtgagaccgaggaggagaaacttcaacgtctggaagatctctcggacgagatgctgcagcctcgcacgacgacgctgcctggacatgtacagactgtgtttattcaggcgctgctcaagatcctcacagctatggccgaacgcgcggatgatgccacggtggaacgtattgctacggttattatggagcgacttcctgctttcgttcagagcgaatacatcgaggtgcaggagcgtgctgtgtgtctgcagcagctgttgctcgctctgagcatgggccttggtgccctgacagcacaagagcgcactgagcgcgcgttcgacggcagcgcctctctggatccggcaaagcgcctcgacgtgctcgactcgtacttcgctgagaggttagcccctgttggtgtcaaggcacagcgcaaggttccgttgccaggtgatctggaccttgacgagcctctgagcaagtcggaggccaagttcctcgagtcgggcggtgacgtgtcagcattttcgagcgaggatgaccttgaggtgtcgtttgtcagtcagggacatgcaggtatcggcgggggatacagtggcattggcgacgatcccccagagcggaagcctgggagcaagcaccaccgccaccgccggcaaaacggcgcgtcgtcttcagaatcggaatccgaatcggagtcggagaattctgcggacgagagagaaaggaaggagcgcgagtacgcccgtgagcaggagcggttgcgcaaggaccccttctacctgtctgctggtgggcaaacttcaactgatgctggagccaacgcggtaaggatgagtgttacgaggccgttgtcaccgaacacgctggctgatgcctgtgcgtttggtgtgcttatagggtttcgcggatatgatgggcgccttgggctccggagcaaacggcaagaagaagaaggcttcaaaggtgcgtcgagttgtctgagaggctgatgcaggcctttcaccgtctaactttcgttttgccactaacagaagtcgaagtcgcgtgatattcttgaggacgagttgatgcccgaaggcgcacgctcaagtgatgaagaccgtcgtcgtactcgcaagaagcgtgaatcagtgggcgaagatgtacgtatccattcgcaaaatagtgctacaatggttcatcaattgatccacatattgtgatcattcaggaaaccgatttggctgccgtggacttgagtatccctctgggtgagaacgagaaggttcccaccgatcagtggttccatcgccagacgcctgcctcaaagccagcagatgacgagaagaaatctaagaagaagagttccaagcacaagaagtcttccaggggtgaggacgacggcaagaagaaaaagaagaaggagtcgtcgtccaagagctccaagtccaagaagccatcgcggaaacaagaggacttgctaatcggcggctttagtgacgaggagcaggagcctgttgaagcgcctcaggaaagccgtcacaagcaccggagctcatctacgaagaagagcaagaagagcagctcgagcaagaatggtggcgatgtcgagaagacaaagaagaagaggaaggacaaggagcacaagagctcaaaacgtcaggaggcgccgccagcagaaccgcttctgctcttttagatgaccggccggccacctcttcgtttgcaggtacataccatctctttggtgaggtcgaaactcagctggagacatgagacggaccgagagaggagaacaaaatgacaaataggtgatgaatttcttcaggtggtctatggagtgctgggctaatgtcttccatgacgaaaagcttacttcttgtgcttagccttcttggacttgtggtgcttctcgtgcttgtcggacgagtgtttcttcttgcgcttctccacgacgggcgacgcggtgtccggctcggcagccttctcctgtggtaccggcgaggcgtccggacgctcctccacgagcgagaagcagcgcgagaacggcttgcccagcacaaagcgagcgcggtccgaagcaagcggcagcgcgttcacgagctggtccgtcagcatgcggtcctcgctctgcagcaggaacttcttgttggcctctccggccgtgaccttagccagcacctcgccgggcgccgccgccttgccttcatccaccttgatcgtcacgttggcgagcaccgacgcgtcgagctgcagtatgaaaggcgtcagtcagtcgcacacttgccaccaatgtagaaggttgccacgaccaacgtacgttcttaggcagcttaaagaaccagagctcctgttcgttgttgatcacggcttcacgggtgacggccgcgctgcccttgacgctctcgaagccaggtgggatctcgaactctctgcatcccaagtcaagtcaagtaagtacgtgttgtgtgacgcaagtcgaaaataatgagtgacgctgggaaacacgcggatgcccacgtactcgtcggattcctcatcggagctggactcctctccctcctcggctgactgcgtcggcgtctgctgctcctgttcgtcgtccgaggacgcggccgaggagctctcgtcgtcatcgtgcgacttgctcaggttcaatcgcttcgcgggcgccatacttggtttctgactgtgggacttggatggggaggattgctagcgtctggagctgctggtgacgtgcagaagctctcggtaacggtggagcagacgccggaagagcgagataagtacttgtcgcttggtggtgcgtctggcgatgcaaaatgactggaggcagtcaatccgttgattttttactgtgaaaatcagggtttggtgagatattcaaatttaactgtagccatcttgcgcactctgactttgcatgatcatacggaaaccaagtgtacaatatttgtgttgaagcgaatgtacagtattttttaaaatactgtaggataagtagtatttggccggacacccgtgatttttttcttaccatttgaggctcatcgacctatttacatccaatcatcgttggttagggctaggtttattccgttccaacttatttccggaatcgtccggaatttccttcttcgcgcaaataagtaaccatacaaaactaaagatgtttctcgtacttactcgataagtgtaaaaccagccggatgtagccacttccaagctgctcgacaccgtagctggaaggtcaagactgactccaacaacccaacaagcgcagaacgctgtcggtagtaaagtaaatgaaagacagaatagaagctcggtggtcaagtaaataaataaatgaaataatgatgggttatctacccttccgcagagtgagtccgggacccggtctcttgtcgataggtatccagtcgaagaccccaggcaaataacagccattgcccctttttagccaataataggtcagtagcacgcgcaagtcctttcacagctcattgtctcagaagtctccctcaacctccctcgtcgctcaagaaacaacatgcgctgccacagaggcttctgggcctacgcaggcgacaaagtcaccgacatctcggacagcgctgcacgcttcgcgcatgaacaagcctctcaagcggagccaggtgccaacaaggcggccacgaattggctgcgaacgcgggctggaagggctctgaagaagcgctgggagggggagacagcggagattcggcaggattacgtacagaagaaccctgacgctaccttttcgctggacgacaacccgctgggcttcgcggatggccggcaggatctccggcgctatcctcgaatggtgcgagccgacatcgctacgcctgtggtactgcaggaagaggctccggtagcaccagctacgacacgcgcacccgtcgacactcagtgtcgagaacaagttgatgagtttaagagctaccaggacgagttgctgcgggctgcgttcgtggccgaagtgacagcgcttgcgcacgcagtccgagcgaacgacgttagccgagttgcgtcacgttcggtggcagtagtagaatgtatgggcgcccaaattgcagcaagtttatcccccgattcaagagctcgtgttgtgggaatcatccgtgacgtgacagcgtatatgcaagctgcacgaacacagctgactatgcactttgatgaagaggcggatggcgcgcttcatgaaacgcagactagcgcagctgccgctaactcagcactgagcaactacgtgcgtgataccattcaagttaacccagacttcaaggccatgcacgagggcagggaaaactacacgaccagcagcaccaataacttgcaggagttatattggctaggaaaagtaccctcggtgcgaactttgcaagctagtccaggctcgcctgctgtgtcaagtgatgcgtcggctacatcaactacggtgtatcaggcaggggcgtctgtcgagagactcaatggatcggttgctgagggcgcagctaatagcagcaacgatgctcagatatcaccctcggctcaagcaaaacctaccactattacctctcgcaaacgcccccggttgctcgaaggaaagcagcgatccgccacgacaaattcaaagccacacgcaaccagcggaaaagagcaaccggctggtaatgcggcagatgatgaagatagcgcgtatgagccaagcaatgcagaggaaagtgacgtggatgatgacgatgtggaccccccgaatcggtttttcagaaagcgcgtgtcaaaaaatgatcctgtgggttaggaacaccagatttcgcgcgaccaactcggctggagtggtacactgtaccggtagccgagctcagccgagctcagccgagttcaccaacttatccggacaccttatccggctcagccgagttcgaagaattgtccggatagctcatctggaccagccgagctcaagcgtcgccgagctcagcgaagagtcggccgagatccataaccgcccactttcatttggtatttgtataggagcttaggaatagtggaggtgccccttcagggcgcccgacagagataacaaacaacagagcagaattttctaggcctaaagcacgtgtacacgttccggtaagtccctgcacggggccggataatgtctgctgccggtacccgagaggcatagcttgtagggtactcggctggcagcgccaagagattaaggtcggcccgggttgggcgcgagtctcgccaagcgcgaaggaaaagtctcgccaccgctgcgagccggtgttcccgtacgtcccgggcactgattgctgagtcgagaagcctttgctctcggcgacctgtaaaagcgctccgtgcgccgtcgtccatcctttggtggagggtgtagtgggcctactttggctcactactttagcttacacgtgtgcgcgtgtatgtgaggaagcgtagcttagtttaaattagagttaattatactcgggccaccgagtatagattaatctaaataaacgatccaaataatgtttttgggttaaaatgataactgctatttttgttttatgtttctgacttcctctaaatgtaatattctaagataggaatctgccaacggctggttggcaaaattccaatgctatgcatgtcgctcattggctaagtaagagatgctgctcttagccaataggaatccaaagtctctatggaccacccgtcgtggtggtcgtaaatgtatgtagcctttggtgtttctacaccaaggtcgagaaagtctttcgaacctctaacagacgtcgtatctgttagagttacaagtgactgtagccacttgtgcgtgttaccctgttacaccatccccccctcaaggttagacgcgccgagtcacggcacgtcaatcaggaaattgaccattcgtcaattcttcacgttgggagaaagaaaactcgagctcattccgcaatgagctcgccgcagaagaagaccgccgccgcaacagagggtaacctctctgttgctcaataccatgagcgccagcaggcaaagcgcgacgcgctcgctgcaaaggccgcgtcggggacaactcagtcggagattgttctcgaaggttcctctgtagtcaacgacgccgttgactatgggagtgacgacgaagagatggaagagggcgaggcctcttccaacaagcgcaaggagtctatcgacagtgatagtctcgacccgcatgccgggtcgagacgccctcgtgaaggagacgactcggacgcttcgagctcgaagcgttcgcgcggcgagagcgaaactccgctctccgctgctggggctttaagctccccgcgtgaggtgtcgtcttcaagttttccgcgcgctgctcaggcagcgcgcgatccgtggacgccgtctgcgtcagagatcgcagaccgtgtgggcaacaccgtgcctccaaatgaaattccgctgtacgtatgcagcgggatccacgatgatgctgtggcggaggagtagcactttgatccgttaacgaatcaaaggcgcgattactatatcggactctttcacgagctccgatacttctccagcaagaagacctcttctcgcagcaaagtgcctaagtggcaggcactttgtcaaagttggaatgcttttgttgagaacttcaagaagaagccggctgcttaccgtgagcgggttaagcatgcccgtgagcgcttcgagacattctcgacgcgcgggaggctggagcagctccacagatcctctgtggacgctggtattccgtgcgctgtgcccgaaggccatcagtgcacgttgtgtcttccgggtgcggtgcgcttgagcgaccgcgacctaaaccggtacacgacgattcgtgtacctgagagtctcaaggatctccgtgccaagttcttggcacgcgaggaacgcgacgatcgtgggacctcgggcgagtaggggaccacagcgctcgcactaccttcgtgtcggcagtgtgtggtgagcttcgtatgccctcaccatttccggaacgtcctgcaggaggacgtcccgtggctcccatgtatcttggtggggcggaaaccctctccaacgaatacgataacgaaccggctgccggttcgttttcgggatactatggttcacaatacgctcaacaatccagcgtgttgagccgcaggcgtcgcggatcggaggcggcggtggtgggaacacgccccgggtatggtcaaccaggggttgaccttggcccgacgctcgaggagcgggtcgctgctgtggaacagcatcagatccgggagttcgccgctctgatgcaggcggtggcgatcctgagggctcaagtcgctcaggcctcgcagaccgcgtcggacatctctgtcgtcgtgggaggttgcgtcgcacgcttggcccagcgcgtttacgcgctggagcagaggttcgctcccgctggggcttccgcttcgggccagccgagctaggtggctcgtgcggcaggtatggcttaagccgcccgacgtaaaaggtcggatggaggcgcatgctagatggaatatctagcgtgtaggcgttgccatgccgtgccaacaccgtgaacggcccaatgaagcgcggagcgagcttgctcgccccgaagtcggaaactgcatgtttaggcaggttttgagttgctaacaaaaccaatgaacccttcttgaattcattagtgttgcccctaccaacattgtctgcgttcagcttctgtcggtcgacagaagctgcgatagcgtcttggacaaaccgaatgacggcttgtctgcgctgcacgaatttgattgcgtccgagctgaactcgttcagctcgtttctagcagtaggcccggcctctgcgttcgtcttcgcggtgtctgtgccctgcacagacccgttcttcttcttcttcttgctcttgtcgacgtctgtgccctgcacagacgcgtgcttcttcttcttgttgcgcgtagtcgcggctggcactgtgcaagtgttagcggcattctgcgactgctgcgttgcagtcgtagatcctcccccacttaaggaaggagccaccatcccgagtagactcgggaggcgtgggtgcctgatggcattcacgtagaacggtgtatacccggtcgaggcatgcaccgagttgttggtggcgaactctgccatcggcaggcactcgctccagtgttggaacgagtaagcgtagctcttaagcacgtctacgagcacgcggttcacgcgctcggtctgcccgtccgtctgcggatgatccgcagtcgacatcgaaagttgactcccaagaagtgtaaacacttcttgccaaaggtgtgcactgaagcgcgggactcgatccgacacaatgtcgatcggcatgccatggcgtttaaacaccatgtcaacgaacagacgcgccgtctgcttcgcagtcacttcagcgggtaccgcagcaagatgtaccatcttgctgaagcggtcaacaaagaccacaacgcccgtgttcccctggctgtccgggggaagaccgaacacgaagtccaaagacatggactgccaacactcccgtggagttggtagtgactgcaagggagcctgcgcgaaaggcgcaggcttcacacgttgacaaacctcgcaagcacggacgtacttgcgcacccatttgtactggtgggcccagtagaagtctcgcgtgagaagaaggtacgtcttctcacggcccggatgccccgcagtcggtacatcgtgatactcgtacatgatcctgagtcgcaggtcatggtcattgggcacgacaacgcggtccgcgttgtcgtcgactgcactgtagagtaacaacccgtcgtgcacccgataacggtgtgcacgagcacgaagatgcttcggcagcttctgacgagcttggtcagaaggcgctgagccgtaggccagcaagagcttcgcgtcctcgtcgtgcgcgaacgcgaccttcacgtcgtccaacagtgatgacgtcggggtgctcgatcgcatggcgtcaatggcattgacgtcggcatcagtcgtggcgtagtcaggtcgatgcgagagcgcgtcggccaccacattgagtcttccgggtttgtactcaacccggaagttatactctgcgaagaatgagagccatctcgccatccgttgcgagatgtgcggcgacttcacagccgtccgcaacgacgcgtggtccgtatagaccacgaacggtttgcttccgagtagatacactccgaacttcgcgagtgcgtacttcatggcaaggagctccttgtcatgtaccgggtagttgcgctcagctggcttcagctgacgcgattggtagtagacgacacgatcacgaccctcgtgatcgtgctgcatcaacgcacatccgattgcgaagtcggatgcgtcacacacaacgtggaacgggcgatctgggttggccaccgccaagatcggcgcctcagtcaagtcccgcttgactgcatcgaaggcctactgacactcagcagtccaaacccactcggcgtccttcttcaggagctgtgacagcgggcgtatcaagcccgcgtagtccttcacgtacttgcacaagtacgtggccaagccaaggaactgccgaagttccttgacgttcgacggcgtcggccactcattgatcactctgaccttctcagggtcaggacggacaccgttcttcccaacgagccacccgagcacgggtatctcgctcgccccgaagatgcacttcttcaggttcgcatagagcttgtgcttgcgtatgagcgcaagcagcttccggagatggaccttgtgcatctcaacatcgctcatcccgtccgcagcccggctgtggacgaacacatcgtcgaagtagctcggtgcgaagtcgcgcaccgagcgcaacaagtgcgtcacgcacctgttgaaggtcgcaggggcgttcttcagaccctgcggcatcactagccactcccagagcatgccgctcggcgtgctcatagccgtgagagggatatcgctctcacgcattaggatctgatagaacccatcgcgcagatcaagagcactgtagatagtgctcctggccatcgaatcgatgataacatcttttcgaggtatcggcgtctgcgccggtatcgtcgcatcgttcagcttgttatacgcatgaacgatgctccagccgccctgtgcggggatttcgattcccgcacttgtccagctttgcgacgactttcgaagaagtcgtcgatcgctttgacctgctctcgcggcagtggccactaccgcgtgacacagtacttcgtgcccggcacgagatcaatctcgtgctggattcccttgtcctgcggaagctccgcaggaatctcttccggaagtacgtccgcgtactcccgtaagatctcgtagtagggactcgttttcaacgagtcccagctctgctcttcaaagcgctccttcttcgtcttcgcactgagagtgtcctcgctctcagtggtggtctccatgaagaactgcctcagttcttcattctcgctcttcgttctctcggcgtccgagagaatgcatatttgctcgatgcgtccatcgtgcaagtcacgcgcgaagcgcttccagctcatgactggaagcgaagtcaactccgacgcttgcgtcggagggttagcgagagtcatctccctgtaccggaacccggcacaggtacgcgtcaagacgttcaacgtctcgacgtccggcttctcagcctccgtctgcccggcagacattccttgtagcgtctcggccccaggccgagacttgcgcagcgatcttcgcatgcgccgtcttcttgttttgcggagcccggctccgcttcgttcttgacctcgtccaggcccagccgtgggcgggtgttcttctttagtaccgccggcgggttcatcccgcgggcgagcgacttcaagcccggcttggtcgcccggcgcttcgtcgtacagcccggctgcacgacagcatgcaagtttttccggtgcggaacgtttgcaaccgtccgcaccgcctgcagcgtcggctcccggagccgacacgccatcttcacctcgacgcctgttattggcggagtcctccattacggagggtgcgtcggctccccgagccgacgaatcaaatttgtccatgctatcgactcccggagtcgatgcgacttcaatacctcgacgccaaccattggcggagacccccattacggagggtgcgtcggctccccgagccgacgaatcaaattcgcccaagccatcgactcctggagtcgacgacgttacgtcaccttggctctaattattggccagacctgatccaatcagattcgcgtcagcctccacggctgaggagtgtgactcgcctgcgtcatccgtgccccttcaggccggagactcttcctgattcgctgaaaagcgggtgtcgacctccgaggtcaacacatttccttcattagctgtcggcggcaacgccgacgctagctgctcttgcgcgcgtgctcgcgcgcgcccagggcgctccgggacagcggcattgggcgctgtctcgagtggggagtcgcgcgcacctgtcggtgcgtgcgtagcggcaacagggccatcgctcactgttccgctgtcgcgaccgaagcgcactctcgtgcgcttctcccaatcgatgaccggatcatgccgtgcaagccacggcatgcccaatacaatgtcaaacttatcgtccagatccaggacgataaaggtctcgacaaactcttgatcttcatacgtgaagcgcacgcgtaccatgcgcttctcggtcttcacgacggcacccgttgccagtcgtacttccaacatacttcgaggtatctttaaatcctcgaagtcaagccttgatagacttcgcagtcgaacaaagttcttcgacgcgccagaatctaccaaagcacggagagagccgcttgctctcatcgagttcacattcaggatgacaaggtcaggcttgtcatcttggttcttgcagtgaggataagcctcactgggggctgcagtcctcagtgtcgcgtgtccaaggtcgacacgcggaactgcattaccagttgggcgccccgcgcctactggcgtccagcgttttttgtttggttgcgacggtgcccggcaccgccgcgataaccaccctgctggtgcacgggggccgtgcactcccgagcaaagtgaccgattctaccgcatcggtagcatcgcacattgtttccttgcgactgctggggtccagcagttgcagcactcgagaggtccatgggttctgggcctcccgtcctcactaccgggcgtggctgtggcctcggcacatgtgcatgcagcttagcctgccgcaggctaaactcctcctgcattgcaagagtaatagcagcttcgagagttctcgtgtactcacggaagagataggtcttcacaggcccatctctcagtcccttcatgaatgtgacgaccttggtcgcctcgtcgatcggattggtcacgatgttcgagaccaagtaccgtgctctctgagcgtaagcatggacatcatgcttgccctgctgcaggtcgaggaaccccgccctcgaccggaactcgtttcgcggtggctcaaacgcttgtctgagctcttccttcaaaccctcgtacgtgctaaagcacgtaggatccgagagtcggcgttcatacgcccaacttcttgcacgtccgccaagacatgacatggcgaacgcgaccttcgacaacgggtcgacgatgcgtcgagccgcaatggcagtgtcgagttcgacaagccaacggaggagaggctcgccctctcttccaacgtaactgatcacgcggagcttcagcgattgcacgcgcggtgtcgtccccgacgacaccgtggtagacgaagcagcatctcgctgctccctcatgatgaatcccagagcaacaccatgctgctctgtcggcgttagcgtacgcagcatcgtagctacagccgcctcaccaatgactgttgacagtcgttggagagcttcccactctgggtccgacaggtggggacagtcagcgcgtgcaacgtgagttgcacgcgtagtggagctttcaatggacacccccgtatccatgggaaggttctcagctccgcggtcgtggggtgacgtacgaactcaggtagtcggtcgttggacggactacaatgtgctaccaggtgtagtgggcctactttggctcactactttagcttacacgtgtgcgcgtgtatgtgaggaagcgtagcttagtttaaattagagttaattatactcgggccaccgagtatagattaatctaaataaacgatccaaataatgtttttgggttaaaatgataactgctatttttgttttatgtttctgacttcctctaaatgtaatattctaagataggaatctgccaacggctggttggcaaaattccaatgctatgcatgtcgctcattggctaagtaagagatgctgctcttagccaataggaatccaaagtctctatggaccacccgtcgtggtggtcgtaaatgtatgtagcctttggtgtgtctataccaaggtcgagaaagtctttcgaacctctaacagtcgtcgtatctgttagagttacaagtgactgtagctacttgtgcgtgtaaccctgttacagagggcacagggttgagtgaacggaggccgtcgaactcggcggttctccggaggagtgatcttggttggcaggtctcggcgagaggcgagacacccgctgtcccggttgggccgaaccgctcgggggcaacccggcgcaggccaacaaagccgaccagctcggctattgttgtgtttgtagccaagttaccacaactgacgattttgtgtgtactgctataccacaactggtgccgcgacccgggaacaggggtgtgcttgtgtttcgtaggtaccagctaaccgaggtttgagaagaagagaagagaggtcaagggaattattacgccgagtccagcgacggttggaagtatcggctggactgaccaactcggcggactcggcgaatgcgatgaccacggacgcgacggcggacgaggcgcgcaccgtccagttcgatgaggaggatgcccaagaccaagaaagtgaggaagatgttgaggatgagtatgaggagaaagccgagctactcggcgaagtcgacgagttgttgctgcaagtcggacgaataggtaccccacgtccagttgtgcgcaacctggcgaccgagctcggcaatgatacggacgacgaagatcaagccgccgctcaaggggaacgtccgcccctgatcccgcgagcgacgaggaatgcggatacgccaagtgcgaacaaggttctgggtaggctcggagaggagatgcgagctcagagcgagtggatgatgatgtttgccccagtggtgatggctcaggcgagatggccggtgctagggcccgagctgactcagccggtgaacagcaccgacatcaaccaactggtcgaagacacggtgcagctactcaaggcgatggggttccggtgcacgagccgacccaacagcctgctactcggcgattgggaccccagccgagcttcacgcgaaatcctcaagtggaagcggcggttgagagtctcgtttggtctcgagcgggggaccgtcggaattcggcagactattgcgaaacgagtggctgatactccgaagaccgtcgaagaccccagcaggattcccctgccgaagactcccgaacgcaagagagccgaggtgttccgctctactgagggtacgccgtatttcgaagattcacatatgaagacgccaacgcgtggcaagcagccaagtggacgctacgctgagttgtttgacgctgcagacgcagccgagctcagcgacagcgacgatgggcgcgagtacctgaactcggctgaaaagtcggtgaaggacgtcatcaagcaccttagcttcgatgacgctgaaagtgatcggacgcaatacttggaggttcgcacccatgcgtccctcgacaagatccctatgttcgaaggcaaacgttaccgaccggatgactctctccagtggcttaagcggttcatctacgagatgaaaggaactcggctggcacaagacctctggtacgagccattctcgctgaagctggagcgaggcgcgaagtgctggtatcgccagctcccgaagaaaacgcaacggaagcggagtctgctgagtgaggcattcgccgactactactgttcgcagtttgaccagtcggcacgagctcgctattactcggctcagcgcaaagacaacgagctggtgtgtgacttcctcgttcgtctcaacggatatgcgaagtcggcggaaatccagtacgaggccggtggagcggatgctgttgaccatgtggaacacttcctgttgcactgcggagatgatgacatcatggatctgctctatccgcaacagctcaccgacatcaagaaggtcgagaagatcatcaaccagaaggtcctgggggagcgccggacgaaacagcgcgaccgtctcatcggaagccgcagccgagatgccaagcgcaccgattcgccaaggcactcggaagctcggcggagtgagccgcgccgagatgaccgccgagacgaccgccgggaacgacgcagagatgaccgccgggatgaccggcgaagccgacgcgacgatggtcgagaccgccgactagcgacagcgctgctggaggacgacccgtatgagctggctgagagacgccaatccaatcggcgatccaacctctacgactcggactgcgatcagagcgacggcagccagccgagctacttcgactcggctgtagactcggaagacgattacatcgacaccgggttcaccagcgaccgcgactgtagatcgggggaccgagagaactcagctgggacaccaaggagtgatcaccgaaggggtcagccgagctcggctgaccgcgccagtcgaggatacgatcggcgtgaccagactgggcggcgcagtgactcccgtgaacgccaccttgtgctgcctgcggtggtgcgaaccactccgttcactactgccgccgtcgctgcaagttctgcaagcaattgcacgatgtcggtcaatgcgagctgttccagcgctatgagaagctcgccgcatttgtcaagtccaatatcgacaagtccaagttacctgaagacctccaggacctctacacgccgagtgatttaaactcggcggcccgccaacactgactgggttggatgataccgggctgtcacagtcagctgagccagcagtagaggcgaactttgtgtttgcctttgtgggtgaggcaggaaggcccgaggcccgaggagaagacgacgtattggactgtgaaagcgatggacttgatggtgagctcggcgagagtgcagaagaaagccgagcaagattgtgcagtgcgactcagcgatcgacggatgtgaccacagccaccagagttatgaagcggctccctggggagcgactcggctggtggtcgtcaaaaaagtttgaccgccgagttcggatgagagctctcgttatgggagcagtgaacggccagcgtacaaagatattgctcgacaccggtgcgaatgtgtcggcaataagcgaagggttcgcgaagaggctgcggttgaagcggttcacacgccaggaccaacagattagcgttcaaggtattgggaaatgcaaagtggcgacgatgtcacgagcgatggtgaaggtgaccctcggctgggaggtcacgtatgaatttgaagtatggatcctcgatcaccacgcgggagtcgagttgattctcggtacggacttcatgattccggctgggatccgcctggatctgtacaactcggtggcgaagttgccagatgaagttgtcctacctctcgtgaggtcccagaactcagcggatgaaccgaagggcggcctctacatcacagacggcccgaccgaaccggtgaatctcgagagccgagttcccgccgagttcaggctgatgaggaatcaaccgagtgatgaaacacatgacttctgggtacgccggactaaagactggctaccgaccgtggtattcgaccggcgtaaccgagtggctcgagttcgcctgaccaaccttaagccaacttggacgtggtgcccagcacatttcccagtggttgcctgggcgccgcatggggtgttaccgcccgatggttacgtcaggctgcactcggcaagtacaaagtttggcaagtcatggcctacgaagcggctatggatatggatctgctgcaaaaggaacaacagctgtacgccgagtggctgactcgacagccgtcagctgtggaccgtagaaactaccctgaaccgaaaggggtgactacgtggccgtctaccaagcagcgggattcagcactgacttgcgcccagcaatgggagaagttagccgagtcggaggagcgagccgaggcagaagcagtcgatagtccaccctcgactctgacagagccagcgaactcggttaccgctaccctagcgcctgaggaattagcattgagcgcggagcctactgctgacttggtcaatggcccgcctagtcgagcagagatcacagtgacggctggtcaagaagcgcccagccaaaacgcctgtgcagcagatgagtgtgaaagtgagcaatccagcgatttgtctgactggacgatcatcgacgaccccgggcccaagccgccgagtccaaggctcgaagatgaggtcgatgtgagcgacgagcccatgtcgtcagacccggaggaagacctgcgcttacgttaccttctggcagccaagtacgaggaagagacagatgaccgaggcgactcggcgggagactcagccgagttcgagcaccaagcaacgaacttggagctcgaagactatgctcgcgagttggcgttcctgcccgatctgactgaagcggtgtcgacgccactcgactatgaagcgccaaacgttcggagctcggcgcacactcggccacagtctactcggctggtggaagtattgaagagccatgaaaagatcatgatctccagtggtaatgccctacctacggcgtagtgtgtgacatcgacgtacaggggcatccgccaatccgccaacgagcccgccgagttccgctgaagcatctcggcaagttgtacgagctgctcaaggcgctgttacgggctcggctaattgtcttctcgaacaactcatggacatcacccatcgtgattgtcctaaagaagaatgggctcgacattcggttgtatatcgactacaagctggtaaacgcgattacgttgctcatggagtatgccatgccgctagtggacgatctcctcacggagttggaagcgtacctatggttctgctctttggatgctgctagcggtttctgggcggtcatgatgactcgacgggcgcgttggatctcggcttttgtttgcgcgcttggccacttcgagtggctgcggatgcccttcggattaaagaatgccccaatgatctaccagcgccttattgacaacgctctgtggggttacgtacaacccaagggcggctggaaggtgttcgccaagcgcatcgaacaagcggaagccgcctcagaagctcagtggaaacggctcgcagccgacatcgactttgaagccagtggccagaccaagtttgaggccgaccgccgagctcaagctgagtttgacccattggaagaattcattaacagcccagaagccgacatgttccggacgggtgaacctgatgaatcgtgccttgcaccggttttcgaccggcgatcgtttgtggacgatatctgcttcggtgggaggacgttcgacgattgcttggggacgcttgaccgattgctgcaacgcttcactaaatgccgcatcagcgccagcttcccgaaaagcatcttcgtccaacctaaagtcgacttcctgtcacatggggtgacctcggttggaatccaaaccgaccagaaaaagatgctggcgatagccgggctaccgttcccgacgacgaagaaggcgatacaagcattcttaggagtgctgaactactacggccggttcatccaaacctggatgtatatggggcggtcctctatcagctgaaggactaagatttcggacccggcggtgatctgacggccgcaaaagcggcgttcgccgagttaaaacagcaggtagtcgacgcacccatactccgccacttcaactcggctgaggacgtccacgttatgcaattcgccaatgagtgagctctgagtagcacgctgatgcagctccacgacgggaagctccatccagcgcggttctgcggccgagtcctcaaggataatgaactcggctaccatcccgccgagaaagaagttctcgccttgctacagctcatcaaggtgtgccccacgttgctcgccgggaagaccatccatgtttacacccgctactcgactctcgaatgggtgttccagtcgaagtctctctacggcagagcagtcagctttgcggtactgctatcaccgttccacctaaaggtcaagcgggtccgcgaacgggacacggatttcgcccagttgctccaagcgtccatcacgccggcagtgggattggacgagctactaacgcatgtcactccaccgtccaagaactcggctgtggtccgcatggacccagaattgctgtatccgcatgtgccccgagacttcaagggacacgtcctgtcgtttgacggatcggcgaagactgctaaacacggcgggttcgggagttgttcttagatcctgtggcgtctgccacactggaacattgagatcgctgcgagcgcgcacctcccatcgaccacggtgaatatagccgagtacaccggcatgaacaatggggtgacctcggccattgagcgcggggtgacggatttgatcatcgtgggcgactctcggcttgcgatccagcaatccaagggggtgatcgcgtgtaagaaggatgcattgcaagccgagttagcacgccacaagaaattggtcagcaagctgaattcagttcgctacctccacgtagtgcgtctctacaactcggctgctgactctttagcgaccgaagcactggaaaccaaagcaggaaaggaaaggtcgtgctaagcgccggacggaaagccgagttgaagaccctaaacaggatctctgaggtcctgtacgtggacacggactcggctgcagccccggccgagggtgttgagatggctgccgtgacaaggagtcaagtccgccgagtccgtttcgaagacgaagcggcagaacacccagtcccggacccagctatggatgaggaagcggaacgtaatgactttgaacgagatagccgacctccgcctgctagacagcgggtgacgggagaagccgagttcggtagcgcagcaccaccagctaacccagctgagctggtagccgagctcggagaagcccgggagcccaacgccatggacatcgatccggtagtggtccaagctgagcgccgcctgcgaatagcaagagctcaagacgaggaacaacgatgggccgacttgaagacctaccagagaggggattatgcgcagctcacacatcgccgagctcacaacgctgggaaagttgccgacgagtttgtgctcagcgaagacgggctattgtaccgacaaggcaaggccagaccacctggcgaactcggcgaactaggcttatcccttcgactggtggttccgacgaccatgatagacgaggtcctgcagaactgccacaactccatcgagggaggccaccacgggattgtgcggacataccacagggtcagagccgactactactggattgggttgtacgcagacgtggtcaaacatgtccaagcgtgcgaagactgcagtaccagtaagagcaaaccacacctgaagggctattcacctggcaacgtagtgtctgagcgacttcaacgtggtatcgatggactttgtcataccactgccgaagactcggcggggcaacactgcactcctgttgtttctagaccacttcaccgggttcgtgattgctaaggcaatgagtgagactggggcacttgaggtagcgaaggccttcgaagagaacgtgttccggaggtttggagctccatcactggtacgccacgacagagatccccggttcatgagtgaagtgttccagaagttctcggagatgatgcagtccaagtcgagagcgacgctgagttaccgaccacaagccaacggtcagcaagaacgctcagtgaagaccatgatccagactgtgcgtgtgtgcgtggaagaccctctccaagccgactgggatgatgtagccgagaagctcgtccatgccatcaacaattcgagagactcgactcggcgggagacctggtacacggatgggacgctcggtctacactcaaggcgatgaccgagtcagtcaggctcggcaggggcaactcagctgactcaacgggggcagccgaatggcgcagggaagcaaaccgacagagagaggtggctttgaagcttacggccgagttccagttgaaggagaagaaacggagagcgaaggaacacaatgacggactcagccgagtcgagcggagagctgtcccagccggggaggaagggacggataccccagcgaactcacccgagggagcagccgagtcgactgaggaaggtgacgagttagccgagtcgaggaagtcactattcaaggaaggtgaccaagtttggttgttcatggaacgagtcagacctggcttgaccaagaagttagcacatcgatggcatgggccattccgagtgaagaagaaggtggaggagtttgcctacgagctcgagctcccggacaagagcggataccgtttttaccctgtgatacatgtgtcacgtctgaaagcggtcacgggactcagcgagcggccgacgactaggctagtagccgacttagccgagtgggatcgtctcgactttgacgaggaactccttcctgaagatagctgggagcccgatgaagcaatgaatgaatacgaagtcgaacacttaactcggctggtagaattaactggccgaataattgacgacatgcgtacagctatggttgatacaacatttgtagtgatcgagaacaagccaaatcgtgcaagaagatgttgaaaactacaaacttcgtcttcatttgctgaaacgatttgtctttcacgaggtttacgtctctgaaggattagatatcacctactacaacttgtagtctacaagcgtaagccaacggaggacgataattctgtgatcgggacgttttcgggcgacacgttcaccaagatcgcgttcagcgtcgacctgaacgggctggcggacgctgagaacgaccaccctttcaacgaggctgtggatgtgatggcagaaatgctgggctcgcggctgctgtcgcccacgtgggtgtggaagctgaagcggttcctgaacatcggagatgaacacaagctcaagcaagcctgcgcgatcgtgcacgagctgacgcaccgggtgatgagtaagtcgatgtagaaggacaagtcgaagaaagacaagaaggacgtgctcatgcttctcagcagcgacacggatgtggcatgaacttttgcttgccggcaaggacactaccgacttcagcttggcgtggattctggtcaacctgaaccggtacccggacgtgctgaccaagctacgcaaggagatcaacgagaagctcccgggactcgtaacgggtgagatcgacatcccaaccatggacgacttgaaggacatgccgaatttggaggcggtagtcaaggagagcctccgtctgcacgctatcgcgaccacccgtgtgcccaacaagtcggtcacactgagcgatggaacgttcgtgccggctgggtgtaccgctcgaatgacgagtgtgtggggcgaggacgcttcggtgtacaagcccgagcgctggatcgacgctgagaccggcaaggtcaagatggtgtcgccgttcaagttcggcacgttgatctcgggtctcgccagtgcgtcggcatgcgcttcgctctgctggagatgcgcatcgccaccgccgtgctcttcagccgcttcgacctcaagacggtggacgacccattcgatgtcacgtacggttcactctggcgatcaagggctcgcttgatgtcaccgtgtacactcttccggctgcgtagcttacgcagaggaggtgaagactgagctgcccttgcgcattaaataaaatgagtgatatcaacttgttccatccatccaatggtgacctgaagtaacctggctgcatccacgagtccatccaaatcacatcctttcatcgtttttgagatcatcaccacctcactgcacaacatggcagcaaactcactgatgcaattcctccgcatggtccggcgccgtcttggtcaatgtcgtcgtcgccggatgagcgctcctgatcttcaatgtcaatcccaattagcgacagggaccagcgaaattggaaggggtgaactgcttgaaacctatctggacaacgaatcggcgatgaagagttacgcggaggagatcaacctcgatcgtatcagaagcttgggctctgaagatcgtcgcgcgattgctttgcgttggtctgcaccatcgagtcttgaaacgttggcgagtcttaacgtcgcatcgagcgcttgagcacgtctgagttggctcgcacagaaagctgaatcaatgcaatacaacccgcgccgtttgtttgaaaaactcgctccatcttacatatagttataatttttctgggatattggtacattctcgtactgcgtgattcacagtaaacgccgctttcacggacgtcggcgatggggtgggtggagagtcccttggagttctgcttcgggtcggcttgccttcaatcggatgccattggtcgcaggagctcgagtcccagtcccatcgtcgcgccgctccctcgctcattgctcgtcttcatgccgtgcttcttcttctctcgtcctaactattttcttgctacttggtattttttcttgctgacatttccgtagcacgagttgtccgctggttgtatgagttgtagttgtgtcgccagagctcgcgtacgtcgtaccaatggcgggcgcacgcgttaggtctggctagctggtcttgttgttgttcttgttgttttcgtttgagtcagatggagcgcgagtttcttccgtattttttgttctggatggggccggccgcgggtgccttgatctgtccagacactgcggccgctcgtcgcgttgctcactcactccgttgcgttgtaacagtgccgccgcacgtcaaaaggtggtcgacgtgtggacggctctacttcaccgagcggggctggtgcagcgacgagcgcatgttcctcttggcgtggaagctgttcttcttgtgcagatgcacggcttgcttggaggcggagaagctcttggccttggcggccttggccatcatgctgtagatctcggcgtccacgtccgagctggagcgcagctcgcgcgtcttctcgctgagcttgtagtgcagctcctggtggttctccatcaggtccagctcggccaggatctcgttgatctcgtccacctgctccagctccagcatctccgaggccgtcagcgggtagaacgccgggtcgaacagctcctcgtcggggatctcctgcacgggctccacggggtcggcgatcacgaagcccgacttgccgggcgagtgcgggcgctccaggtagtagtcgtccgtgatctccgggtaccacgtcatggacggatagaagggcggcgccagcgcgtccagcgtcgacgagggcagcggcgaggacaccatctctgtagatctgttgctcagtcggtctctgcttctacttgcgggccttgaagcgaattgcgatatggtcgcgctagagcttcaagcggcgcccgcgcgcgcttcaaagagggcgcgcttctacgtgtttttccgcgcgtcctatcggagcccgatttagcctaatttgctacggataagataaatcatgacggattggaaggcgctttcgaccaatgggggcgctgcttttagcgaagaacattttcgcctagccgcgcgcactgaacttcaaggtctctgatactgcctatctcggggttgcatgcttgcaaaagggccaggttcggactactgaatcggttgctcccatagttagtggcctttacaggtgaaaatgtgctcggaaaactgcagaagagagggaaatcattcatgcctgatgatggttcgtcacacaaagacggtctttgcattcttgccaagaggtaatcgattgcctaccaacactagcaaggagcgcctcaaaagacgcaggaccaccgcttcgtgagcttcacgctgcagcactgaagtgtgttcgcggttctctgcgtctcgttgccagcaaaacacaacaccaaaacaggaggtatctccaaggtatccgtgtgcctcagcacagacggaataggcgcattgcggaaaactgaagtatcctggggcaaaattccgcccgaaacgctgggctaattgcagatacaccaggcgatgttgacttcgttgcgcaagtagatcgtcggcaccagcgccattgccattgtcacaatatgcggtgctcgtcggctcactagcaatggccgcagagccccacagcggaaacatcaggctgagcgcagtctactacaacttcatttcaaaagggttatgaataacatcgtgttgtgaccagaatagtatctcatacttgagatagtatctttactgctaccatactactattaaatactgtagtactactgatacaaagtattagtacgtttttcgacacaaaacagatagagttggcttgagcgcaccactccatcgcaagaggaacacaagtgacaagcgtcagaattgtagaatcaaactactagtagttgtgttgttatgcgccagtaatattgataaaagtggaaacgccgagcaaacctaccgttttgtatggaattctgggtgcatgcacattgaccaataaactccacgaatgcaaaatgttcaacgcgcgattgatagaaagagcagaacgatggcgcaagtttatggatagtctccatggacgtaccgactaggggacaacttaaaatggactagacgataaaacagacttaccatggtcagtggtcgtagtgattttcgacttgagactcgaaacttagcacgaactaggtgcgttcctctttacaacaaaatattttgaaaatgtcgagacggcgcaaaacaaaatcgcaatttctaatattatcaagttctcagttttcagtgaagtacgttgttgttgtcgctaaaaacgtagttcgctaatgactatgaccttgtcggcggtcgtctcaattcaccagtgctgctaagtttctcggagacagctatataatagcttaaaggttggaaatttcaaggagttctcgacgtggtttcagtccagccaataccccacatgactgtgggcatgggcgtagacgtcgtcccatctcgagcatgagccgagtgctctctggagaactgatcgtttggacctacttccgagaccatgtgttcaaatatgaccccatttcagaatctacgcaaaaataactacttagtataacaactttttaaggtgcattgtgtcagacctcgtggctcgaccactcttgcaatttgaaagcgtacaatagcttaaggtaaagctgaaatacctcgctaccacacacagctgaaatagctcgcttccacactggtatacgctaatagctaactcgacacgcgaaagtcttctacgtcgaatggagcgttgccagagaaactgcatagcaatagcattttccgtgcattgtgaacatgtttacagtgataacgcatcactgataatgtagtagcagtagtgacaacggtattaataatctcgcgtgatttactacccgtattactaccacccaaatccacccaatccgcgaggagctccggtatcattggcatcaccatggtgcgcgtcgcggtggtgggctgcgcccacgggctgctggacgacatctacgcgaccatcaacttcgtcaacgagatggacccggagcaccccgtggagctgctgctgtgctgcggcgacttcgagtgcatgcgcaacatgcgcgacctggacacgctggcgtgtccgcccaagtaccgcgcgctgcacgccttccaccgctactacaagcaggagaagacggcgcccgtgctcaccgtgttcgtcggcggcaaccacgaagcctcgggctacctgcaggagctgcactacggaggttgggtggcccccaacatgttctacctgggcgcagcgggcgtcatcaacgtggcggggctgcgcatcgctggactctcgggcatctacaagcagcagcactacacggccggacgcttcgagtcgatgcctttcgacaacaacaccatgcgaagcgtgtaccacgtgcgcgagctcgaggtcttccagctctctcacgtgcagcaggtggacaagactcctctgggggcgttcctgtcgcacgactggccgcgcggaatcgagcagcacggcaacgtgccccagttgctgcggcgcaagccattcttcgagcaggagatcaggaccaacacgctgggcagtcctgcgggcgagtttctactgtaccagttgcgtccgcagcactggttcgccgcgcacctgcacgtgaagtttgccgccatcgttgtgcacccggagcaaacaaccgacgcagtccatgcatcaaccaatggtgacagtgctgagctagcgaaggcggacgataaggaagagcaagaggcagcaccaaagcctccgtcgcagccggcaacgaccaaatttctggccctcgacaagtgcctcccgcgccgcgagttcatgcaaatcttggacttagccacttccgccactatcgtagaagcttcgtcggccgaagaacagaagaacgaagcagtgattgcaccggcgacgaacggagacaagcaagacgatacccaggaagagaagccagatgacacaagccggagcccgagctcgagaccgccgcctaagatcatgttcgacctggaatggctcgcaattctgcgcgccacgcaccacctggcctcgtccaacaagtttgcgccgcgcgtgccccaggaagagatgaaaatcgaggacaaggatattgcgtgggtgaagcagcgcctgcaggagtttatcgcggagaagaagctcgacaaggccgaaggtgagtggatcaccgactttgtcaagacagcaccaggtcacggcgaagaggaaggacccgtcctcgtgaccggtaatcctcaaacagatcttctgctggagctgctcaagctcccgcacgtcgcgactgcgccgttcgtcagcggtggcacgactgcggcggcggtcgaggaccccaacgaaattgacctggacgaagacgacgacgacgaagagaacgatgacgatgtgaaaccaatggagaccgacgccgccacccccagcgatagcactaatgtcagctcggcggcagtagcaacagaagccgagtcggcggcacccgcagacccgtgcgaaatcgacctcgacctgtaacttggaatgaaattttgctagtatgaatgaatcaacgttccttcagatgttgaggatagtcttatgtccatgaggacagcctttggtcgccgtcgagatggctacacttttatattttagcgtttgtataccgtcagattctatcattttcccgaaatcgaagatgaagatgtgggtgagggaggcgacgaagcgcgctcgcgcgccgcacttcgggccaaggctggactacggagtggacacgacgctgctgtgagatgctctcgcgcttctagtggtagttttaccttgcctatcaccagcggtgactcacagatattgcgatcgtcccgcagagaccccgctctacggtcggcgtttgtgcagctggactgcgaccaagagactgaagcattcctggatgtacgtgttagcgctgtatttattctcgattgttatgtactatccctcagtgctgtacatcgcggcggtgtgattcactcgctactggctgtagacctgcactgggggaagcttgtgggagtcgctgggctccaccatcctcgggctcttttactcgctcaccgacgcgaacggaattctagggcgtaagtgagaccaccgatcgacaccaacgctgcatcccattgcagcaccgcactggacgactcccggctcacggtcatgtctccattaattcgttgcgcggcacattgtaggtggtcagatgttcgtgctttcgcgcgcccaagtgcagcagcttcttcatcgcgaagtgcctgtggcaggaggtggcggatcgctgcttgacatcggagccggagacggaaacgtgacggcgtcgctggcctcgctcgtggaccaagtgaccacaaccgaggcgtcggctcccatggtggctcacctcaacgcgcggggctacaacagcgtacaaacgtgcgacctgcagcacgaattcgtgcagtcgcggaagccctacaacattatcaggtgcgtcgccgcgttgggatcttagacgcgaccctttttttgacgcgcaacgttgcgtgctcgtcacgactaatctgatggatcgctgctcgtggactgcagcatgctcaacgtgctcgaccgcgccgacaagccgctgaccatgctgagagagatccgcgagatgctgcacacggagaacggtctctttttgctggcggtggtgctgccgttctccgcgttcgtggaggtgggcacacagcgcgtggcgccaaccgagaagctgccgatgcgcggtgggctctgcgcggacggcgcgtccttcgaggtcgcggcgagccttctgctgcgcaacgtgctgttgccggcgggcttcaagctgcgccacttcagtcgcgtgccctacttgtgccgtggggacatgcagcagccatactacgtgctgtcggacgcgatcttcgtgctggaagtcgacggcgaggcgcaacagcggacaagttgaagcggcgctggctactcgctctgactcctgctgctcccggcgaaaatagtcgtaaccggccacgtgcttttcagtaaactgagctttttgctccttcagctaagacctcgccaccaagtccgcgaaaccaccgcgctctatgtgtgtggtctgcagctatagcagcctggcgatcgtccgcgctgaaatcgtggcggcgtggagtgcttggggtggcgctggacgctggaccccaaactggcctcggctcaacggacagggagcaacagatacaacaccatggcatgggcttcaacagcattgctccttggttagctgagccgagtgccgcgcagcggataccttgaaggcggtgcagcggcaagatggctgcagccggagacatgcccagtgcgggctcccaaaggctataataaacgcgcattggctgaaaagctggccttctcagcggtttctcattggtcgatttgtgacatgactacagtgtggctgacttaacacgaaaacgggagaaaagggtcgtatatcgaagggtactttatctcaaaaggtaaatctacttggttttacccattcatcacattcgatttcacagggtatgcgatctagttcgttgcagagtgggagcgcagagaagaggcagagagaatggctttctttcgcacaatacattttgcgctggaagtcccaaggacctctgcgcaaagacggacgccgctggaactggccacagcacaataccacaccgccaccatggcgccgctcgctgaagcctccgcgccacccgcgcccgccctggagccggccaccgtcctcaagcagaagctcgtcgaggaggagccgcagggcgaggccccgtgcgacgaggacaacaacgacgactccgccgtggcagagaccgccaagccccagaccgacgacgttgcagctgagaccgaggccgcagcggcggacgcccagcggccgaccacgaagcgcgtgcggttcgacgtggccgacgtcgtcgagttcgagcccaccatgtggaccgccacggtatcctctgagggcgtgccggtaagtcccctctgtgttaaatgagggggatgctccagcaaagatctaatgtttgtgcttgtccctctttgctaccgcagctcggcatgtctgcagacgtgcgtcgccgcaccaagcgcccgctggacacgtacgagagcgagcgtctgatgcagcgcgtagaccgccaggagtacatggagctgggctatctggagcccgaggagagactagacatcctcgagaacgctggccactccatctctattatcagccacgtcgagcgcgagacgctccgtatcaaccgggaacggtgggagtccaacgagtacgacctcatgtaccagtacggactgggcgaggtgccgcttatggaagacggcgacatggagatgatgatgcagcaggaggacggcgacgacattatgcacgtagacgacagcggcgacgaagacttcttcttcggaggcagcagccgcaacatgatcgtggactctgagatgcgcttcgcaatggaggacatggacgcgtacgacgccatcaacacacgcacatacgacgaccttagcatcgactacgcgtcggactgcatcctgggcgacgacgaaagctcagacgagaataacgagctgccgtacgccgtggactcgttcgactcgccgctgagctgcgacctgctagagatggggacgtcaccttcggacgtgtccgggtcgtcagactgcatgcttgtcgctgcaacagccgctagctgtgctgcaagctccgcaactagtgctagcagttcgacagagcccgccactcctgtggaagccgcccccgtcgtcgccgtgtagatttgtccgagccctccctgatcccctcacacccgtgcgcatgctgccacggatgtagtatatgtgcagctgacttcgcgctgcgccttccgagctgccccctgatcgggtgaagtggccaagcatcccatcggtatttagtaagcaggggagaaggctcgactgcttctcccttatattttgcccccttttgactgttgatagcggatagtttcgataggatagcgcttctcgtattataactgctttgatgaagataagaaggtcccagtgaactaatgaaaaagcccattgtcaccccgcgctcggcttcgtagttgcgtgcgtcctgccttcgcagtcaggattgatgttgaggcatgtagatacgaacgccatatccatattccggtaggtcctcaaatgctcggtctatcaacttttgaactctccaatgcagtctctgagtgaatagaccttcaagccgctcatgcaggtcacgcaatgtgatggaagtgcttgcaggaaacgcgatcgcatttgccgtcattatcgtctgtgtcattgtttgtacacagaacaacaagcactcctgctcgggctacatgtagccggttcctaagtacacagattatgttgcaccgatcagaatcatcactctgaatcacaaccatcactctgaattttgacagggttttatcgaacttagccgaagctgtacagtacgcggttggtctcaacttcttgaccacagacttcggtgcaaaagctacgcagtcgaattagcagcagcagctcccttccccagctccgcatcatggtgctctcctccgtcgcgcgtctgtcgacgcgctcgctgcgctgctcgcgcgccctggcggcgcgttcgctggccaccgcagcggccccgttcgacccgcaggtgccgcactacgacgtggtggtcgtgggcggcggcctcgtgggctccgcgctggcctgccagctcaagagcaacccggtgttcaagggcaagagcgtggcggtcattgagccgtcggaggcccccgtcgcgccgtccgtggaggaggattcggtggacctgcgcgtgttcaccatcacgcccgccagccagaagctgctggagagctgcggcgcctgggacctcgtgtccgacggccaccgctccgtgttcaaggacatgcaggcgtgggacgccatgggcgacggcttcatccgcttcgacgccaagaaggccggcaaggacgtgctcggccacgtgctggagcaccgcgtgctggtgcgcgcgctgcacgaccgcatgaacgcgctgaccgccatcgaggacgacagcgcgccgctcaagctctactgcccgtccaaggtcaagcacttccagcgccccacgtccgtctcgggcatctcggagatcggcctggaggacggccagcgcatgaaggccgacctcgtggtggccgccgacggcggcaactccatcatccgcacgctctcggcgctcggcacgtggggctgggactacgaccagcaggccgtcgtggccaccgtcaagaccgaccgcgtgaacgagacggcctggcagcgcttctaccccacgggccccgtggcgctgctgcccatgcgcgacggctactcgtcggtggtctggtcgtgctcggccgacatggccaaggagctcacggcgctcagccccgaggagtttgtggcgcgtctcaacgacgcctactccgccccgtcgacgacgcccgtcccgcccgagttcccgggtctcccggtgctctcggacctggtcaagggcgtgcaccacgccgccagcaccatcatgtcggccgctgccctctcggacccgttcgtcgcccctcccaaggccgtggccacggtcggccaccgcttcgccttcccgctcaagctgaagcacgctaccaagtacatcaagccgggtctcgctctggtgggcgactccgcgcacacgatccacccgctggctggccagggcctgaaccttggcctgggcgacgttcaggcgttgagcgatctgctcgttgagggcgtcaagagcggcgagaacctctcgagcgagtacttcctccagcagtacgaggacgagcgtatgaaggccaacatcaccatgcagttggccatggacggcttcaagcgaatgttcggccccacgcccgacgccgtgtctgtggcacgcaacgttggcatgggctcgctcaacgccgtggagccgctcaagaaccagatcatgaagtacgccatgggcttgtagatgcatcgcgcccccagcaaacagtagatggcgagttgacggctcggtgttgtcgtatcaactaaagggaacggaagcgtcacgagcacgtaggatcaacttctatatcgtcttgctagtgttgcgttcgtctattcctcgttgacctgcatgtcttcgttggccgacgagaacaagtgccggttgacttcaaagatggagatatccccgatcccgggcgtcgcctccgtgtcgtcttcaaagcacgcggtgccctcgggcagcagcaccgtgtgcgtgtcgaggatggtcgcgtaggacccgaggccaggcgtggacagcaggttcactgccttgtagagcaccagcgagaagaggtaggtcacgacgatcatggacggcaccgccaccgcccagtgtttggacgggaagtaggtgaacccgtaggcttccagcgtcgcctcgggcacgtacgcccacaccaagaacaacactgcagggacaacaccatcagccttgcatggatacactctgcttcaagctcacgcaccgtagaagagcgcggaggccagccagcccccgaagccgaagagctccatccgcatggcgtgcagccgctgcatctccttgaacgacacttgcgtggacgtcggcacaatggccggcgtcttcactgcatcatggagttggtcggaggccccggaccctggcggtgggcttgaggaagcgttcgtcgtcgtcgccttcctcttcctgaccatggtcgctgctagaaaatatctcgagctaacgtcgttgtgcgtataaaacgtgtgcacacgagctgcagtggagactgcagcggagaccgaggcaatggtggcgaatacagtctattcaacgagctcttacttattctgctgggtctgcactgcatgggatatcttaccgtgggagcagctcgttcagggcggtgcctccttcattgccgtccaagtcgtcgtcacgggtcattgagaccgagttgctcagtgcgcgcttgacttgctcggtgcgagacactttgcggcgcagcttgcggaagaagccaacaggaggggcgcccgagagcggatacacgtcgtccgtgtcgatgttcttggccagccggaagcagcgcgtgcagtgctcctcctccagctctcgccgcgtgatgatgccgcgcacgttgttgtggcggttcacgacgaccaggtggcggagaccggcacttcggaagaggcggtaggcgcgcacgaaaggagcctcctcctggatcaagtacggcgtctggttcatgtatggcgtgaggtcgacccacaggccgcggtcctcctccgacagcgtgtacaactcgtcgccagcgacgcgacccgcatgagctgcagcgaggaagtcctgatgcatcggagtcgggatcgggtatcgcggataatgcgcctccatatcgtggtacgacaggcagtagttgctggcgagaggcgactccagcagcttgtcatccacgcgcggggtgtcgttcgcttctaagtctctaggacgacggtggcgtagatttcctgtcggcgtcacgtccggttggtaggaggcgggatgcggctggcggtggaacggcttgggcttgtcgacgctgaagtcgttgtggctcagcaacacgttgagctgcttgcgcaggatgacgccggcgaagaagcggctgccaaaagttggatcctccacgatgacggggaacgcgttatgcttcgtgctcaccagcaggtcgaaaatcactccggcgcgctccacagtgcgcagcgtcttcgggtttggagtcatgatgtgcttcacgcgcaggaaggcgccgcgtaatggcggatcccagtccaggaacggcacgtggcgcaggtggatgtggatatcgtagatgccttcgttgaagtagttgcccacccagcgagcgaagaacgacgtcagaatgagcggcagaccgaactcgatgttacccgtacactcgaggataatgacagtcaacgagatggtcatgcgcgtcactccgcccagcatcgccagactccccacaagtccgtacgtccgtgggtccaccgtcttcatgtgctgcacactcgtgaagtagttaatcactcgagtccacagccgtccgtacgcggctccaacgagcaaggctggcacgaacaacccgctcgggatcttgagtccgtacgtgatgcatgccaacaccaacatcatgagccagaacacgacgaggttgcgcacatcgaacgagtctggaggtgcgtgaaacaggtgcttgatggctgtttctcctcccgtcagcatcagcgaggccaagtcgttgtattggccctcggggcagtagaagcgcaccaactctttcttgtacgggtactgcacggtctcgtcagcttggaaacactcagctccatccatcgatacgctcgtacagctctcacaaatgcaagctgagccgttcttcttcagtatttccatcccgaaaacaaaagccttattaggcgttgcagccgcggcggctgcatctgcaagatgaatgacatcgtcgcgagcctggggcaggttgtagcacttgccgagcaggaatggagtcgagaataacagtgaggagatcaggacggacacaagtagagcttccatccacgctactccgcgagttcgaacccagcgtgatcgcaccctcgcgagacgcgtgttaagaccattgaagaaagctccctgcagtccgccaccaattcccatgagcacgaaaagcggcacctcccagatctggtacgtgctcgacgtaaacggcccgaagctgaagcttccggtatgactgccaagcgttccccacgacagattatcattcatcccagagaggaagaacgccagcgtaaatgttgcggacatggcgcagaacagtgttcgccatgtgagcgtctggttccagaaggacgcgccttcctccaacacaaagagaactccgccgatgggagccccgaatgccgatgcaacacctgctgcagcaccacaagccacgaaatcgcgcttctctctatcgttgcggaaacctgcaaagtaggaaaagctacagcaaaagtgtaaacaattataaattcgtccatagtgtgctactaagcaattccagagcttcttaccttgtgtcgtacccaagagtagacgatttaccctgcgaaagtcccgctgcaacaattgcgccgctacacaatagcaattcacacttagctctcgacaggaatccaatcgtgcatgtctacgcacctatggatcatgggaccttcctttcctactggtaatccgccggccacggaacacactgtgccgataattttgcaaaagaacgtgcgcaggcgcagcatgcgtgggatcttcatgccgtttagagtcgtcttgacctccgagatgcctggggcatcaagtgcagtgcaacaaatcgtaacacacttgaagtgagcggcccctcttgagtccctgtctcacctcgaaaagccacaactgacgtacctgagcctgcagcaacaggctcaccgaaagatgtgacagtcgcagcgatcgccacgagcccgagattgaacgccacgatgctccagaacgttgtgccgaacagcacgtgcttggccagctcgtggcggatcgtgtactcgagcaggtgctgcttcagcgacgcgagcagagtggtgaagtagagcatgaagactgcaacgagcgccgtgatgaggccagtcaggagcgtgaggaaccagcgcgcgtagatgagtcggttcttctcctggccgttgcggtacttgtagcccatgcccgacttgttcaccacgctctcgaacaggtctgcagcagcagcagcagccagttacatccgttaatagcccgtatgcattaacagtgagtgttgctgtaggtccgcaccatagtccaaactctcgaggtcggagcttttccagagcattttggggatgtgtcaatctgcttcaactgcgattctctagggcggtagtgggcgtaggcagcacaaatgcggtatgcagctgggcgtgggaaactccgcttccaggggaacgggtcggcaatggatgagatgcagcaggcgcggagatacgccgaccgcatgcacgggaccagcttctcggtcggcaggcgaactctggaactgtgggcggaacatcggtcggaattgaagatatcagccaatccgcatgaagctggtgtgggacacaatagtctcgccaccaatcaggagcgagaaatcagcgaccgcgctcagaatcagataatattcgtttttgaagttatttatggatatcttgtctgtcactcaaaactaccttgatacatcgttacatcgtgtttcacagtatcaggtctgtttacccgtatatattgataccggagcatcgcggtccagaggtaaccctaacgagtggcaaagcaggaagagcttgccgcggccgccaccatgtcgccgcaccgcgagcgcctgacgcgcttctaccagaagtacaacgccgacaagctgcacgagatcgacggcgtgctggagcgcttcaaaggccgcgagacgcagctgttctcggcgctggtgaagaagtacggccccgagccggcggaggacgagcagttcgacgcgcagcagcagcaggaggaagaggacgaggacgacgaggatgaagaggaggaggaagaggtggccgccaccgaagtgaaggacctgaaccaccagcgcctgctggccttctaccagaagtacaaccccgagaaggtgggcgacgtgccgcaggtgctggccaagtacaagggcaaggagtccaagctcttcgacgcgctggtcaagaagtacggtcccgagccgggcgacgcggacgacgaggaggacgacgcggcccacgacgacgacgacgacgacgatgaggagcgcgacgacgaggacgacggccagcccaagctgcgcaacgtggtgtactgccccattgacacgttcccgccggagtactgcgagtacggccccatgttcaacgagtgcaagccgtggctggccgagcactgccccgacctggtgctcaccaaatacaaccgcacggtggccgagctgctggaggtggagcagcagatcgccgacggcgtggagggcatcacgctcgaggtagagggcaagaccgtcaagaagaagaagaagaacaagatcgaggaggccgccaagcgcaaggagaactgcatggtgaccatctccaagagctcgcgcaagggccgcaagcgcctcactttcgtcacgggcctcgaggacttcgagggcgtcaacatcaaggacgcctgcaagagtatgggcaagaagttcgcctgcagctcgtcgctgtcgaagacggaccagggccagcagcagatccagctgcagggcgactgcgtcacggagctgctggaggtgctgccggagatgttcggcgtgcacgaagaccagatcgtcgtcgtcgacgagcccgtcaaggccgccaagaagggcaagaagtagttgaagtcgcagcgtagctcctcaggagctacaacccctaatacagcttcgtgtgctcgtcaactgtaggaaacgctcttatagtgtggaatatgtcccacaactgtcaatcatctgccagtcaactgtcacaatagatttcggctcggtcggaacgcggcgcaagatgagcgacgacatcctggacaacatgtccctctcggacgacgagatgctggacagcttggcggacgacatgctcatggagatggcggaggaggagcagcagcagacggtcgtgcagcaagcggcggcctccgccgtgccgccgtcgtgggcccgcggcgccgtggcgacccccagcgccgcgcctgctgcgcccaacatgcccgacctgggccaaatgatgtcccagatgatgcccatgatgtcccaaatgttcggcggcaacggcggggccaaccccatgttcggatgcggcgccaactcgctgcagcaggccccagtgtcgtggcaggagctcgtgaagcgccacgtgcccgccgccgagcagcaagactggctcaggaccatcgacaaggatgccaccaagctgcgcgtggccagcgcggccaaggtgctgaccaagccgcacagtcgctcctatcgcacgaagccgtcagccatgccgaacgtgtacatggaggtgggcacgatgctggccaacatgctcaacgaggccgtgcgctcgtcgcagctggagcacaaccgccagtggcaggagctgcgcgacggcctggtgtcgcagctggcgcagaccggcatgaccaaggtctacgagaacaaattcaaggccatgctgcggcagcgcgtcgccaacgacccggactacctggcggagaaggacagcgagcgctatcgcaatatcacggaggcgctcgcggtgtagagcgggggtgcttgaacctaagaagtagtagaacgatgccgatgaaggcaatgttgaagcaatgttacgggttttgttgaaagagtgttggaagttgctcaccttgggtaatgaacgccggccttggccgatatggacgcgtcgtgctagataatcccaggagttcatgaagagctcgtggggcctgttgtgcgtcgaacctattggtagcagagtgagcagtgcaggtcctgcactgcagaaagtcatcaaaccgtggatatgtcagcgttgcgatcgtctgtctgtgcactcaaccttcattttagtatccaagctgcagctcggtaagtgatcgcccgcatcgaggacgcgtcgcggcttgtaacatcgcttgtgtctctctgcgtagtgtgcagtgtcacggatacgtcgtctagtcaggccagctatgcagcgggtttggccattgtggcggcctactctgcgtcgcggagcttcgcgatggtcagtcgctgcgttggccgcgctgctcctctcatcgctatgctggtgccagttgtcggagcttgcagagatggaccacgcgctggtgcgtggcctgccctcggggattcgcagctactggtgtgtggagctggaaggccacatcgacagccactactaccgcccagaagcctgcgtcactgctcgcaagcgcaccgagaccatcaccgagctcgtccgcatcttcagtgcaatgctcgacaagagggacgtggactactgggtcgacagcggcaccttgctgggtcaattccgaacgcagtcggtcatcccatgggacgacgacgccgactttggcatgacgatggaagggtacgagcagcttcgggacaagcactgggccgttcccgacgggtatgagctccaggtctacgacagcaagatccatcgagcccggaaccgcgactggaacatccccgctcggctcgtggacaagacctacggcttctacgtggacgtgttcgtgtttgtcgagtccgaggccaacggcgttgaaatgctgggaacgcacccgtcgagctgttggcacgcgtgctccaagtgtctgcagatcgaccggtacgccaagctgctcctcattccacgatactacgtgtttccgcttctgagctgtccgttcgccgactttcgagtactctgcccagcccgacgaacattgtacctggagcatctgtacggcccagacttccgaattcctcgcaggacgtagtcaccagcgacgaaattgctttgagtatgggcttgcacaggtgatccagcgaatagagcactgaaagtttttacgtgtgtcgaggtggttgctttgttagacacttcagcttgacataccactaaaagaaaaaaaggatgcacgatcactctgcaatggagcagcatagattggaaacactgatgaacgcacacttatgtaagtttgaaagcgtagccaccacgagatcgaaagaagtgttcatcaagtcggccatctaccggccgagcagatcagagtaatgctcgatgccgccatgaactgtttggttccagattcaaacgcggcgcggattcttgtcaaactgaacggcgtgaggagaattaccgcatgctcgaacatttgtggagatcggcgttgctgccaagggtaacatgacgcatgcgcgtccttgaaagtgcatggcggtcgtctcgcaacctcgagtctgcatggagtgttgtgtactgcggccacgccacgagcctagccgataccagaaaacaacgagagcaggcaacgaacgcctgccgccgcagagccagcgcggcaatctcgctgcgcggatcgattggcctcgggaccgtcgcgatctgagcagaaacggcgtgttcgacgtgattggtcgtgacgtggcaaggtcgatgtcgcaagtacgtaccgtggtatctacatttcgaccccttcaaaagctaccctaccgattctcacaaataaaaagaatctcacagtccagatccgatagtaaacgacagtttcgcatatcgatttatagaaacttgacgttacccgacaagtgtctgtgacggccgagcagctacaaatcgcggggttgctggaggcgctggcttggagggcattcccgagctcgtgccgcagcgcgaacatgacggcggcgcgcctgctgggccggagcacggagcgcaagctgcggctgctgtgtctgcacggcatgtaccaggacgcggccacgttctcggccaagaccaagccgctgtgcggcgcggacgcgagcgtggacttcgtcttcctggacggaccttttaccatcgtgccgccgattctcgcgcgccagagcaagcgcgcgagtgccttctccgccgccgcgcccagcaagcccaagcgcgtgcgctgcgccaagaagacgaccgagttccgcgcgtggtggcggccgctgggcatccaccaggaggaccccggtagcttggacggagaccgcgacgtgctgctggacttcctgcgcgcgaagctggacgaggtcggggacgtggacggagtcatcggtttctcccaaggggcgagtctcgcggcgtggatgtgctcgcacgaggtgcgtggggtaagcgcgctcgggtgtgagcgcgcagtagtaactgacggactcttgttgttgctggatccttgtgtgcaggcccgatctgagctgcagtggtctccaaagctggccgtgctcatcggcagctacctgggctccccgcagtactcattggaatcgggtgtggtcccggacattgcgtcgctgcacgtgttcggctcgaacgactacgtcattccggccgccaagagccagcaagtggtggacatatttaaacaggaagaggtgcgttcactcgagtgggcccgctacacgtagatgtagctgttgaagactaacacttcattgttgttgtggttgccagaccatccagaaccgcgtgctgacttcggtgcacacgcagggccatgtgatccccaagtgcgacgcgtccagggagctgttcgagtcgttcctggccctgcagcagctgcgattgctcggcagctccagcatttcgccctcggcgtcctcggaggtcggcgagcgcgaagatctggccccctcggaggctctggcgtcccagcgggtctgcgcgctgtgagcccccgagcacaagcaccaaagtgtccaccaagtgtagccattttatttcatgcttagtttcatccaatgataaggctcctcgatctaatttgctgaaattcatttcccccaatcgcgttcgtctccgatctcaaaatgccaaaacacggtgtgttcctgcgcaccacgaatacttggcgcatactcagcgccagtctaaaaggcggcggggaggaagcaaagcgcagcgagagagaccaaccatgtcggccgaggacgtcgccaaggccttcgtgcagcactactacaccacgttcgacacgaaccgggcggggctcgccagcctctacgtacgtctcatgtcgcccaacccaccgagaagagcccagtgcatgtaactaagtgtgtgtatcattatcatcgtgtctgaattctctgcagcaaggcgtgtcgaacatgagctgggagggccagatgtccacgggccagcaagccatcatggccaagctgcagggactgccggccgtgcgccacgagttccccaccgtggacatccagccgtccacgtcgggcaacgccatgatcatcttcgtgcagggcaagatccagatcgaggagaacaacccgatccagttcacgcaggtgttccagctcgtggcccaccagcccggccagtactacatccacaacgacgtcttccgcctgcagtacggataagcgacgggctcgctacgttagttccaagtcggcaggcacgcgggcggaggctctaccagcgcccacttttcctatagtttaaagggggttgaaggcaacgcagcagcggagaatgaggatgtcccgaccaggtcgacgtggagtgaggtgaagatatttttttctgtggggaagacacgctacatgtggcactttgagccggcgaacgagagcgacgtaggagacggacggaacacggtgaatagatactctccccctcgatatcgacgcgttagccaactgtgcagttgcaatcggtcccagttggtgctttggcttgtgcaggaggactgagccggaagcacggatttaacgtgctgcgccgtatatttagctggagagcgaagacgttcgcgctgataacccgctgctgcgcagttgagtagaattggcgtcgtcgttgctgcgtggaatcatgagcgctgccggtcctcaacctacaggcgctccaagcagtgtgagcacccgttcatgtgccctgacctcgtgtctgttgtcgcaactaaacccgttgtcgttatgccccccaaagccgtcccgagtgacgctcatggagcgccaagcgttggagaaaggagacgtgtcgatgcttgccactcttcgcgtgcgtgaccgatatcgttcgttagtgcgcgaagcttcctctaacccaattgttcttgcttgcgtatgtacagatcggtgagctggacaagcttgtcgctgcaatgcggcaaaagcaggcgatcacccaagcggcaatggaccactacgagagcgagatcgtccacattgatcgagaggtggccaacatcatggcgcgatacacgcccatgtgcaaacgcctcgaagcccgtcggcaggaacggagcgagttacagcggcagctggacgttgcctctcgacaattcggagacgttctggccgccacgaagacgcggcttcgtgcgagctcccacgagcatgtgcagcatattcgtcatgaagcttcagcggagcttgcaggcgcgcgaggctacgcgctgggccgcaatagcaccgtctaccagaagcctcgcaagtaaactagctttgcaccaacatattactgcatttcaacgcctccctctcctgctgctgtctactaaacctgcgcaatagtgccgagcgcggctggagtagactgcgtgtcttacggcgaggaggccttaccgtcgtcttcatcgtcatcatccaaccggtttcgaaagctgcttggcggcggcgtcgactgcttcgactccttggattctgcgaggttggccagggacgacgcccgtgtagatgctaagttacctgtgctctccacgttcgtgtttgtgttcaggccgctggagccaacgacaacaggggccgtgtcttggttgagcttcttgaagttgacgattttctgaaagataaactcgaggacgtgcttggcatcgctgcgctctggatcgagccgcggcaggatgccaaggatatcggcgctctcgcgcacgtagtactccaggtcgtcatcggagcatttgttcgtaagctgcgcgagccgcagggactcgctagcgaagtgctcgtcgagatcgaattggtccagtgctggcggaggcggctcacgcaatgcgggcggaaatactgcagacttgagcggtggcagtgggcattcaaactgcggagggataagtgtgagaggctcgtgcttgacaccaagctctcgataaagatttacagcttcgggaatgagagacgtgtcgaacttgaagagcgagtcgtcgaaaagcctcgtgaagtcctttggaagctcctcgctctcttgcatacaggatcgcaatcggtcgctgagtgcttgtgtgtcaggtaaccggacgtactcgttcagatccgggtcttcggcgtcctgggggttaagcgtgatgcccttatctttgagcaaccatcggaaaataatttcctggagctttgagttctcttccttgtcgatccattcatccacaaagcactgcgctgagccgaatacgaccagcctccctgattttgacttcgacgcgggtgttgcaacgccgccttcttgccacgcagcaacgactggtctgttcaccggatacgatatgaagcccgaagacagaagcggagctgctggcttcttcactgtcagcgtcgctccgtaagggtatacgaaagtgaggcccttctggtccttttccagcgcaccacccggacccgtcggtttgaccatcgaatcacgccccgacgccagtaaatccttcctgccgtacagctcgttcacctggtgcaccataccaacattagtcgacccactcagttagatgtcacaatgaaacagaaatgacgcagtaccatgcgcgctagctctctgtttacgacgccgctcgagatgagcacctccttcgggtggtgatacttgtgatataccgtccggatgactgcgtccgggttcacgaatatgccaaagctgcaacaacaaaaacagtagcaaagcgtcaggctacaagtgtcaccacaactacaccagatagcgagcgagccacgcactccttgagccagccgttgaggttggtgtcgaacgtctgctcgccgccctcgcccagcatgagcaggatgctgccgcctccgttgagaaagtccttgagcgtggcgaactcggtggagctgaagcgctcgcgcacgccggcgaagaccagcacgctcgcgtcctttatccggtcccgggacaggtcgtccttgttgacgtccacgcggcacagcggcttgagcttgcgcgcgagcttcttgagaccgctcgtcgggtagaactgctccttcttggacgcgtcgaacagcaccgtggccgacttgcccaccgcggcgccgcgcgcgtcatcctggccttccatcggagcacgcgcgcagtcaagtgcgcggaggggtcaacgccgtgccgtgccgtggatcctaaaaggtcgcgtccgtcgagcagatcgtcgtgtggcgtacacgaagttggtgtgccgcacacagcgacccaaatcaggaattttcgaccgccagtcagacagactcggaagggggatctcacaggcaagggcggaaggaagaatggtacggccgtgagggcgttggtaggtctggctgtaaggtgagctgcagcggctgacgctcttgtatgtgtgctggggcgactgcaggcggagttccgacaggccaagcacaccatcatcctggtgcagtacacgcgcgacccgaactcgcgcacgtacctggacttcgagtcggtgaacggcggcatggacggcgtggtcaagatgtacgaggccaagctcaagcagctgaacccgaacctgaagaacatcacgtacgacatccaggacctgtacacgtacatcgactcgctcacggacctcaccgcgctcgtgttggacctcgagaccaagacgtacctgccctgcggcaaggagtggatcaagaagaaggtcttccaggtgctcaagaaccaggccggctaagctgcatataaggaggaagggaggggttccaccccacccgctacgtggttgataacaatgacgcactgcaaaggttgttcttctctctctattccgttccgtgttatcggagctcttggagctggtgtcgggacgcttggtacaggtagaagagctgcacgacgacgagggcggtgagcaccacttgcaggaacacgctgggccctccacgcactgcagttgagagcttagacaggagcgccgccgctgccagcgcacagaagactgcgaccgccacgtcgaatgctggcaaagtggtgtccattattgtgctgcccaatagtgcaccccatgttcggccaaaagatgaaaggttgcattcattaccgtacgtttgacagggttaatgtatgcagacaagttttagttttgaaacggcctcgcctagcgtcaagtcgacgacacaccacccgaagtcgagcgtagcgcgcgcgagaaagagagaagcatggcacaggaagcaggcgacgcggccccggcgctcgacatggtcaagctcatcaggtaccgctggcagtggcaagcaacgtcgacggtgggagagctcactccgtaatgtcattttctaccgtgaattttgttttgtcgcagcgcggaaggccacgagatctacatcagcaggaagtgcgccatggtgtcgggcaccatccgcgccatgctcagcggtgcgtgtccgtattgctcacttgaggttaataacgatagtgcagacgccgacactgacgcatatgttagcaggccaattcacggagagcaagggcgagatcacgttcccagacatcagcgcccccatcctggagaaggtctcgcagtacatgtactacaagacgcagtactcggacagcacgtcgcggctgccggagtttaacatcgagccggagatcgccatggagctgctcatggctgccaactacctcgactgctaggcgctacgtatctgagctaacccccacacacacaacaacaacaactcctcacagtctaatacagtcccaactccactcgatctccttcatactcgttgatggtcgtgaagtggtggaggctgggctgctattctcaggcagactcttcagcggaacaccaaggatcgtcgaaggcggatgctgcttgccaggcagcgacggcgcgcgcggctaatactgcaacagacgatctgcttcgaggcttggttcggcttcctcttctacccgatatcgtgtcttcttctacgggacaaagtaagaagacgcttttggctgcgagttggagttgctctatatgctgatggtgtttgtttgcttgtttgaatgaaagctggctgcgctcgagtacaattcgtcgctgcaacgggctttgcctgtgtgctgcttggtagtattgatcccggcggatgtagctcgatactacctgggcacgcgcgggaacttgcgagcgcaggttttccccctcacagcgttcatgttcctgtcggcgtgtccagtgttccctggcttcgtctacctgaccttcttcgctgagcaccgccttcctttcgacgttgtggcgggcacatgctttgtgttgctgctcatagcagagtgcatcactggctatgtggtgctccgggagttgctcagacaagaggcggcgcgctttctcaaaatgagggagttaagcgatattaccacgagcgagggcgacgaagagcgtgttagatttctacctggggaagatagagcgcccatggccaggtcctggcagtaaagctaaagctttgaatggagttaaaacacccctgcgaatgtgttgggcattgtcggtttggccctacgaccgctcgtgtcttttaaaggatcgttcgcacaatccaaagcgctatcatgtcggcgctgcgcagtatggagacaacccacaagagcacggtgaggaccagctacccgatacggtaggcctctactgcatcctaactctgttctgtgtgcagacggtgttgcgctgcaaggtggcgatcgttggggacgcgactgtgggcaagacggccttgctgcaggttctgaagagcaacggccacgaatacccgaagaactacgttatggtgaggttatacatgcagtgagcaaggctagacggatagtttcgttgatgctgctgcttacttttcttcacagacgtccgacgtggagctgtcgaccaaaagcattgcaatcccggatacgaacgtcgtcgtggagctttacctctttgactgcgccggccaaagcatctttaaccaactcgacttcggcactgttcacgtacgtttgtttgccctgtgcatttctcgaaggatgtttgaagcgatgctaattgtgttgagtgcggtgcattttcagtacaaaggcgcgtcgatggctctagtggtgtttgatgtgaacaacaaagagtccttcaagtcgtgcagcaagtggtaccaggacgttcgtgacgcgtctccgaaccacaacatccctggtatgaaggactaatggcatgtcctagggtatagtggtcctaacgcgttttgtggggcttggtaggtgtattgctggccaacaagaccgatctccgctacaataaccgcgacgctatcactacgaaggaggccgaggagttcgcagagcgcaacgacctcaagtatttcgagtgctccgcggtaagctcatgttacatgatccactaaccgcaacacacttgctgactttgtttattcttttggtattcttttcgtatctccagcaacaaaactcgggggttgaggcaccgttcgcgtacattgctgactggttccacaagaagtaccaagcagcaacgcagcgcgcgtaagaagtaaaaaaaaacgttggagggttttctagcgataaatccctcgctcttgatccttccgattgcaaagatcacgatttattacttcaaaatatttgcttaagcttacgttcgcttggatataactaactaaccggcttaaaactggacgaatgtgtctacttataggggttgcagctggacatcttttcttgggatatctcggaatgtccaaagaaccgcccaaacgcagacaacctgcaggacgtggagcaggttgagactcgacttgacgtcggcacatccgatgccgttggcacacgagagctccttgggttcggtgagagtgcgctgaacggccatgtacatttgcccagtgatgacgatgatcgacagactgacggcgacgaagagaatcttcttgatcttgccggcgtgtccgctctcaggataaagaaggccatacttcggctcagtgacaaccggtaccccatctgcgtcgtcactgagggtttcgatgttgaatgagcggtgcatcatccgctccgatagcgtactcggcatccgatgcctcttttgaatctcgaagtcttgcgggcgtgagagcacccggagtccgtagatgaggaagaccgtgcagatgatcccgagcaccatagcgctcactgccaactgcagatacgctagacccgtcgcgttgaagcctttgtacaggaagagcagcatgtcgtagacgatgtagaacgcccagatgaatacgatgatggtactctccaagcacttcaggcgcgtcggcttagtgaccacaccagctccctgctggatgacgagcgcccagcagcccaatgctagaacactgcgggcagcacggcattatgttagtcttagctcattattacgacgaggaaagtatgactaagttacgtactagcatgagtagagggcggctgtgcacgagtcgctcaggaaagagttgacgggccgagggataacgtggtcgtagctggacggatcgacgccgcgaatcatcagcgtcaacgacgcgtagcaacagaacgtgaagttgcagcgctggagattggacccgtcgtgtttgaacgcgcgcgctgtcatggtggcgctcgcgatgagacttacagtgccgacgacgcagtaccctatctggtaggcgtggtagctgctcgggtcgtaggacgcaagcgttcttacgcatccgtctttcgtttgagcgagcccgtaccagcaagtcgagtccgtgatgttcatctccgggatgctgtaggtgtcgaccgcaaattggtgaatgttagttagtcggcgtgctcaaactcgcccacagacatacagaccgtgggtagtcgacatcataagccatccccagccgcacattcgactgcaacggtgcaggcagtaacaggtccactctgtagagtccgggctccaggtcaccagagacttgtgtgcaggtctcacctttggtatccacacgacagcaacgcgtgacaagagttgtatggcttgcagtggtcgaaatcgtagtcgaacttgagtcagcacgaccgattttgcacattcctctggctcaacaaggtgcatggcctcccgctctatcggatccgtacttcctcctttacttatcgtcattagccggctcatgacttggccgtacaattttactgctatcgagcagtgctcgctcactacgaatatcactaacacttacactcacactaacatcgatcgctcacgccatggtgtagtgcgtctgcggctgaggcaccacctccttcttcttgatcgtgcggaaggcccacaatattacccatacgcagaccacctgcagcacgttgaggtagctgaggttggccttaatggacgcgcacccgatgccgttggcgcactggagctcgtcggactcgttcgcggtgtgagtgaccgccatgtacatctgcgcagcgatgacgatgagcgacacggactcggtcacgaacaggatcctgcggatcttggccgaatgaccgtctttcggcttgccgcggttggcgagcttgggctcctgcaccacagggacgccgtcctcgtcgtcgctcagactgcccatgttgaacgagtggttcatcatgcgctccgacatgagcgtcgggatgcggagcttcttctcgcgctcgtacgcctgcaagcgagagaggacgcgcaggccgtagatgaggaagactgtgctgatgatgcccagcatgatggcgctccacatcagatgcaggtaggtgaaccccttgcggttgaaccccttggacaggaagagagcgaggttgtagatgatgtaaaaggcccacaccaccgccatcgcgatgctctccaagcagatgaggtgagctggtcgctcgcccatggcagcgccctgttggatgattgtggcccagtaccccagagtcagaatgctgcacacaacaaacaggcacgaaggttagacgatgggttgtggccgatagctgagggccaacgagctacttactacacggagtagagcgcggcagtgagtgagtccgacaggaagctgctgacggggcgaggaatgacgtgtccatagctcttggggtccgcgccggttaagaccattgtcaacgccgcgtagcagcagaagaggaagctgtactgctgcagcctggacgcttcgtgcttgagtgaccggatgtacatgactgcgctggcgagtgtcgtcacactaccaaggctgatgtagataatctgcacgtgcagatacgcgttcgggttatacgaggacagcgtgcgcacgcagccgtcctccgtctgggcgaggccgtagttacacgtcgcgtgcgtgatgttggacatcctgcctccttcctatccgacttcggctcaccaggggagaatgcaaagtgagtgaagggtgcgtccttggaccccatctcgaggaccacgagctccgctacgcgtctgcagctgttgcctcttcgaatggaccgactcaacatcttggccttgaactcgtgcacagccgctggcgaagcgtagcacagaaaagcacctgcgattgatttggggaaaacgtcaaaaggtgtatgaatttgaaacgttttgtcaaaagcggttaactcgtgtcattaggtgtatgctagacagtatgtgtatgtggttccaagcgcactaaggtgcatcataaagctgcatcagcaacgaatgcggtgactggtgtgtgggcttagatccaaatccataaaacccggggttagtaaggcttctacctgatgcaactagcagcgaacacggtcaactaataatagcatatagagcaactgtactcgacaacttcgctattgtggctacaaggaactaccaacgcaaaccgcaagcgtctacagcatggctgtactaggtaggttttgcatctgaatttcggaggtgaaggagctctagtgagagtccccaaccgcgggagagtgtaggtattgtagaactgtggcaacgctgaggcctggctacaatggataacgacgttcattgtagtccctcagtcgtacaattcgctatcaaagtcatgggcaccacgaaccggacgagcgtgtcgttaataaactactgtgcttggaagctcgatcctgggtctgtatgacccgacctcggccgaaataccgcggcaaccaaaacgtgtgtcagtatgtgtatgatgagacatgacgcgacgtgacgcccacgaccactacacctattgacaaacgttttcccaacgcatacaccttttgacgttttcccattgatttgctaagtcgccgacatgtcacgcgtcgagaggaaaatgcagtttgtcatacacacatcgtgtcagcttcgatgcggttcgatgctgctggctactgtatttactgtaccacaagcttataggagttcttagtacaagttaagttgtctgcggtatcagcaccagcaacaccatgtccgattgatgaatggactaaggccgaagttgaagcgaaccccagcgtgccaaccactgcgatggtaacaaagggaggaaacgttcgccttggccagctgaccaaaaagttcatggccgcaactctgccgatctacatttctcgatcggcaaggccgatgatgtcagcgtgttggcgtgttgtggcatactacatgtattgagcgtcgacaactgctcgaagattcgaaagccactccaactcggccacatttccaagtcgagaacgttgagcttttggtggcgcacttggttgtgctatcatagcggcagcgcgtgtgcctccaagctacagtaccattttgatgcacgaaacattacttctcgttccgcagtatcagacatcagacactttcgcgttcatgacaaacgaaggtgcacaatcgacacctcgacgagtcctgccaagctctcgattccatgaacaagtgagcctccaaaccttagttttactgttcgacacaacacagtctataacgactttcatgctcaatttacattaggattactttcatcaccaagaccacgctaacagacatacacgaatgtgcaattagtactcgccgtcctccgcctgttgaggtcccgcaacactagccgggctttcctcttttgtcgttgaccacgcctcgcacgaacaccttatacaatcggttgcgggacgacgttcttcttctttatcctcctgaacgtccacagcaacacccagacacagacgcactggaacaggtgcagcacattgacactcgacttgaccatattgcacagtttcccattcgcgcaggagaattccaccggcgtggtggcagcacgagataccgccatgtagagctggccaaccatcacaacgagcgataccgattctgcgataaacaagatcttcttgatcttggtcgcgtgtccttcctggggctggcgtcgagcgtatcgtggctcggggataatggggatgccgccgtcgtcactgttgcaggccaaagtgaacgactcgttgggcatcatgcgctcgcatagggcgctggacatccgcagcttcgcctcgcgctcgtacatctgaagccgcgacagcacgcgaagtccgtacacgaggaacgtcgtgctgatcgccccgagaatgcacgcgctgacaaccagttgcatgtagagcatccacacgggctgaaaccctttggacgcgaagagagccatgctgtaggccgtgtagaatatccacacgaaggcaatcgctgagatctctagacaccgcagtttcgtcggcttctcgacgacagcagagcccttttggatgatcagagcccagtaaccaagcgccaatatactgcaaaaacgtcatcaacaacaataaatgaattagccatggtagcgcagacagcaagaaggttaggaatgacgctgccacgtactacacggaatacagcgccgctgtgcacgagtcggagaggaagctcgtgatcggtcgcggcagaatgttgccatagctgcccgggtcagccgcgcggacgacaaccgtcacggaggcgtaggtgcacagcaggaagcagtagtgctgcagcgcggagcctatgtacttgactgctcggcagtacatgatggcgcttgcgatcacgctcagaacccccagcgcgcagtagacgatctgcacgtgcaggtaggcctcctcgtcgtacgacgccagcgtgcgcacacacccctcctccgtctgcgcgaggccgaaccagcacgtagtgtcgctcacgtggagcttcatggtgctcaccgaggcgctgaactggaacttggctctgcggacgatggcccaacatccgccacagcggagacctggccagtagggacggtccgccccataggcgcagtatgaatctggtaatcaccagatggactgatcacatgccgcggtaaactcgaaatcggtcaggacctggaagcgcggtgcaatacactgtacaataaccccaaggcgacagcttttagatacgtgtgcttagtagatcgctgtaggggctgccatcggccctaaaccagactacactacgacggatccgtgaggccgcggcaccacactcttcttctgcacgccgcggaagacccacaggatgatccacacgcacacaacctgtagggtgtgtagcaagctccacttggccgtaatcgaactgcacgacgccccgttggcgcaagagagctccaggggcgagttcgacacgttggtgacagccatatagagctgtccagcgatcacgataaccgagatagcctcggccaccacgaggatcttcttgatcttatccgagtgccccgcgttcggcctgcgtcgcgcgtagcggggctctgtgaccacgggcactccctcttcgtcgtcgctcagcatcaagctgaacgactggttcggcgccatgcgctcgcagaccatcgtcgacatcctcagcttcatctcgtgctcgtacgcgcgcagacgcgatagcacgcgcagcccgtagacgaggaaagtcaccgcgacgacggccagtaagcacacgctaacagacaactgcacgtagttgagtaccgcgggctggaaccctttgtaaaggcgaagagcgacatgttgtaggcggtgtagaacgcccatacaaacgcgatcgccgcggcctccaaactttttagatgcgtcggtcgctccataagcgccgccccctgctggatgacgagagcccaatacccgagtgcgaggatgctgagcagggacgaaggtcgttagtcttggtttgtttacgacgtgatcggtagaagtgaatcaacttactacacggagtaaagcgaagctgtgcacgaatcggtgaggaaggccccgataggacgggggatgatatgaccgtagctcgttgggtcggcgccgcggacgatcatcgtgagcgacgcgtagctgcagagtatgaacgagtactgctgcaccggtgagctgtcgtgcttcactgctcggtagtacatgatggcgctcgctagttccgtcaggacaccaactacgcagtaggcgatcggcaacgtcagatatccgctctggtcatacgacgccagggtgcgtacacacccggccgacgtctgcgcgagcccgaagtcgcacgtggcgtcggtgatgttcatgcccagtatcatggctcctgctcgaggcgaattggctactggtcccgtcagtggacctcgcggcgaatacgtgcgcactcctgccgcaggatccacccagcattcggtaagggcgagtctgcgagctcgcatgttgggatgcaaccttgagagcaacgggtatccgccgtcgtggggccatctgtcaattggctgcaccaagggatccaaatcgagtcatccgatacactgcggtgagaggaggcgcgacgcggcttcgaacctggagtcaatcgctcgctacgactggtgacagccggaccggtctctgtctgcacaatgtgaaagctttgctggatggcgttcatcgagcctagatgacccgtcacattatacggagactgccgatggcgaggtgggcatcagtgagcaacttctttggcggagctataatagagccatgaatgaacacgtgaataacaggcctgtagccgctgcagttttcggccagcgatcgtcttcacaaatactaatactttacttctcgcttttgccccaatgcctagtatactgtgctgcctcgcgcgtgtggaatgacactcttcttctggacgtcgcggaagacgtacaaaatggcccagacggcaaccacctggaagacatgcagcaagctccacttgggcttgacggtgctgcacagcatgccgttggcacacgcgagctccaccggtgagtaggagatctgcgtgaccatgtacacttggccagcgatgacgacgatggacaccgcctcggccacgaggaggatcctcctgatcttggccgtgtgtcctgcggcagggcgacgaggagcaacccgacgctcctgcgcggccggcgcctcgtcctcgctgtcgctcacgttcaggtcgaacgagtggttcgagaggttgtagtccgactcgaagctgggcatccgccgcttcagctgccgctcgtactcctgcaggcgcgtcatcacgcgcagcccgtagatgaggaatgtcagggcgatcagggccagaacactcgcacccacgctcagttgaatgtagttgagggtcggcgggatgaagcccttgaacgcgaagagggacatgtcgtaggcgatgtaaaaggcccagatgaacgcgatcaccgcggactcaaggcacttgaggtgtgcgggcttgtggatcactgcggcgccccgctggataatggtcgcccagtagcccagtgcaatgacactgtagaggtggaaacgcacaagcacagcagtcagacaacaagcccaacccaaacaacaacagtgccgacagagttcaaagacgtactacacagagtagagcgcagctgtgcacgagtccgagaggaaggccccgacagggcgcgggatgatgtggccgtagctcgagggatctgcgccccggacgatcatcgtcagtgccgcgtagcagcagaagaggaacgtggacagctgcagcggcgagccgtcgtacttgtcggctcggtagtacatgacggcgctcatgatgagcgtcacggagcccacgacgcagtaggcgatctgaaagtgcaggtacacgctcgggtcgtaggtcgccaacacccgcgcgcagcccgctgctgtctgcgcgagtccgtagtcgcacgtggcgtccgtgatgttgagccccatcaaggtcatggcggagcgagcgcgaagggtttttagaaatgggccaacctcccgacttggcgctgcactgactggctgatccctccggtctttggggcgctgatgttcccgacgggaagtgcaggtcaagcattcccgcttttggtgtcgttgaaacatatgcgcgtcaatgcgcatcgtattgaccctgtagaacatggtagctaatagacaaaggctctgcgagtagcgatggttgcaaaacacacggaaagagacgaaaagtgttaatttgatctgaaatggctctgtaagatgataccagagcattgtggacacccgtgatagtatgcgaccatggaggtcaacttcaacttcagcctgcactgtcaggattcagcgtcccacaggcaaacgtacgagctgtatgagctgagcacggtcttgggctcacttactcgaccccgggcgacgcgacttcacacagagttcatttgatagtagtgcacacgctacaggtggcctcgacggagccaaagttttcgctacagatacattcatgtggcctcgacagagccaaggttatcagctgttccagctccgcgcggcgccacgccacgtggggccattgacactcgaggcggagctcgttgtagtgcgcagcttacgcgacaccgtgcggcctcgggacgacggccttcttctgaatcttgcggaaagtccacagtatgacccagatgcacatgatctacaggacattaagcaacgacgcagactcggttagacgcaggcacagcagcgttgggcagacacaagagatcaagcgactgtacctggaagatgtggagcaggttcacgctgcacttgacggtctcgcacagcctgccattcgcgcaggacagctcgacgggggtgtcgctcgtgcggtcgatggccatgtacatttgggcggcgacgacgacgagcgagcaggtctccaccacgaacaggatcttcttgattttggaggcgtggccctcctgcggacgcggacgcatcttgcgatcccgcatcacgggcgtgccgtcctcatcgtcgctcatattcatgtcgaacgaccggttcgacagcatgcggtcctcgtgcatgctcggcatgcgcagcttgagctggcgctcgtactgctgcaggcgactcagcacgcgcaggccgtagataaggaagaccgtgctgatgattcccagcatgcaggcgctcaccgtgagctgcatgtacacgaggccctgcgggttgaagcccttcgacaggaagaggcacatgtcgtacaagacctggaacgtccagaccacggcgatggcgatactctccaggcagaccaggtgcgggggcttgtcggtcaccgctgcgccgcgctggatgatggtggcccagtaacccagagccataatgctgcacaagcgcgacgggggagcaaacacacgaggttattcgagagatcatcgctacggcaaagcacagaaggggagtctggggagaacttactacacggagtacagcgcggcggtgcaggtatcggcgaggaaggcgctaatcggtcgcgggatgacatatccatagctgagggggtccgcgcctcgaatcaccatggtcacggcgccgtagcagcagaacaggaagctgtactgctggagcagagcaccctcgtgcttcacggagcgaacgtaaaggatgacgctagctgcgacgctgatgccgcccagcgccaagtagacggcctgggtcgtgtggtacgagctcgggtcgtaggatgccagcgttcggatgcatccgtcctccgtctgcgcgagtccaaagtcgcacgtggcgtccgtgatgttcgccattttcgctgctgctgtgtcgagtccttccttcctgtttgtggtctacggagataaatagcgctcagcgctggctggggcgtgtcgaatcctggaacctgttcgcctctcctctgatccgctccctgtaacctgccagccgcgtgagagaaacctgcgcgtgtatcgctcgggctcctttgcgaaatgccgtccacgccgcttccgcacagcaaaccagcttgaccaagcgctctccggctgccggctatccatcatacagagcgcaaataccgtagagcagtcatgtccgtgaaaccacatggggcaggctcgaatcctcgcgatggggagccccgcgttaacgaccaatccgcgcgccgccataagaccggagcacagtgcatgctgcagaagcgagatgtggtgttgcacggtgcaagctccgatccgagtgtcgcgggacgaggccagcgggtgccaaggcgtgaaggtggccggtgcgcggtcgacccgtgacgagatcgccggcgcctccgtctcacttgtcacccacagcggaccagagcgcacctagaagaggtggacgcgcggcgcgatagcgcacgcaccagagtcggcggaaggatagcaaggaagctatctctagatgtgttgttgcggcggcgctgctgcgggtgtcgaaattgtgccaactgcgacctcggtcagcactgttgtgaccaagactgcagtagacggcgcgcgcgaaagcagcggcagcagccacagcgtgtgagtgtgtgctctcatgagatccgcaacagctctgacatgtacagccggagctggagcgctgcccgcaatcgctggggactccaggaaggcggcaccagccagcaaacagcggagcttactgtaccgttttgtatccatcgaacctagcgagtagccagtctggttctggttcttaagtacgcaacccgacacctaaccctccacgaccggcacaatgtaccgcattgattgatgtacacaatgccacaccaatgtaccttgatttcggtactctagtgcgccacaaatagaattctctcccatactggaccttgcagcgcctctttccattcctgtcgccgcttcctcgccgctaactttagctcgtcgctctgtgcgcgtaagccaaaggtacgcgcgtcctgcctgacctgacgagggaatccccagtcgagaaaagcagctctaacgcgcgtgcgtgctcctcctccccgttctctctctccctccagccctcgagacagcgcagcaaccatgatgagcggcaccacgagcgtgaccatcaacaccgacagcgtcggcggcgacatggcgcccgccgcgccgcccaagcgcaacttcatccagaaggtgaacgatgtgaacaagatggagctgcccaagctgctgcgctacatgcgcctgggcaacgtgggctgctccatcctgcagatcatcgccggcgtcgtgggcatcacgtccttcatcacgctcaacatcacgggcacgctcgtgtccatctacgtcatcatgttcggcatccttttcctgctcttcgagtgccgcctgtcgcgcatggagacggccatccgctccaacttcggcttcctctacagctacaaaggccgcgccgccttcatcttctttatcggcttcctggacttcggcatcggctcggcgctcgcgaccatcgccggagtgcttatgtgcttcaacgccttcatcaacctgctggtcatgtgccgccacccgcagttcaagtcgtcgctcagcgccgacgcggaccccacggccggatacaccacgggcagccaggaggccgctaacttcatgagcaagaacccggagctcgcggccaaggccggccagtacgccttccagcacgcggccaacacgcgccactgagcggcccggacgagggccggagatcggtcggtcggtgcagggctgccgtgttgaataagtagcaggtgccccgacgcagcctccgggcttcggactcgactatatacctaagctaataccattttctttcaggaaatctgtgcgtcttgatggtcatgagggctgcgcggggccatgcatgagggctattccaggcagcgcgatcttgaacagctgcgccttggggggggggggggctaccggtggggtgctggactacaaacacagagcaggtagggcagactgacgccgactacgagcaggacaagcatcggtgttgacgacaagcagacaagtagtgctgttgcgaagccgcacgagtggagacgacagtggtgcgcattgctgggtgctttcatgagccgcttcagggcgtccacgctgccagcgacaacaccaagctgcacgtccagcgatgttgctgctccaccgacgatagcaaccgagatccgatcaagcgccaggagtcgaaaatcaatgcgtcatgtgaccaagaaggcggcgaaggtcccagtgcacaagatggcgacgtacgccttcttcttctcgcgccattgactccgccgcggacgtgccccaaagaacacaaagtagaggctacgtaccaaatagacttcacattccatttcttgtattcatgcatcgatggcaggccttgattagctgctagccgccacggacgtcgatcgatcgtggatgttggccatcagtgggcccttgacgggaatgacgagcgagtagtcgtaggtgatctcgaacgggttctccaccgtcttgatgtcgaagcggctgagcagaactgccatgaccgtctgcatctccaacagagcgaagcgcatgccaagacactggtgcgggccggccaggaagctgaagaatttgaagggcgacaccttgagcacgcggccgtcctcgccgatccagcgctcggggcggtactcggcggcatcttcgccccaaactgtcggcattcgccccattgcgtacgtcggcacgatcacgtgcgtgccgaacggcacgtgaagacctccgctgagcgtggtcgaccggttgggcgcacgatgcacggtggccatatagaggcgaaggctctccctcatcgctgcctccaggtacggcagcttctggaggtctgccatggaaggagcttgaatctcgcctgtaagcagctcgggcaggttcgcgttgatctcggcgcgaatcttctcgaggacccgcgggtaccggttcatgttgacgatcatccaggacatgctgaatgaggtggtgtctcggccggccaagaagaagttcattacggcgtcgcgcacctccatcacgtcggcagagctgtccattgtcttcatgaagagcgtgatcaagtccttctgctgctttgaaccggttgcagagttcttgctagccatggacttcttcataatctccatcacgaggtcgtgcacaatgactcgagccttgcgaagctcgccttcctcgccaacacccaggcgcttcttcagccgccagagccacatcggactctgaagtcgcgactggaagacagacccatacgtctcgacggccttgatgaacgggtgctccatgtcgtcgtcgacgtcacctcccaggccgttgaggtccacgccgaagccgatcttcgtgaacacgtcgctcgacagcttggccagcagcgacttcatgctcacgggtcggttcacgcgagcacactcggccagcacgtcccgcagctgcagcgtcttctccattaccacggcgtccatgacgtctcggagcatgcccaccgagaacaagtggctggcggtgcgtcgctgcttctgccacttttcgccatccacgccgacgatcccgtcgccgaagaagtcgtggccgatctcacggatgtccaggcccttctcgaaaatgtccacctgcgtcttgaacacgtcctcgatttcttgcggtgacgtgagcaccaacgtcggtgggcgtccgatgatgcgcaagacccacggacggccacccgcagcgagacactgctccgcgaaccagtcgtggaagcggtccttgttgtgcatcaggtccagcgtgtggcccagcacgggcagcgacggaggctcatagaccccctggtctgcgagcacgcggttcacggctcgtctcgctacgacggccgacacgacgttccagccgacgtacgctgcagtcacgagcgcgactgtcgcggcggccttgtcgaacgtggcgtgctggctcagagtccacataggtactgttgaagcccaccggaatgcgcggatgacgccgaattgaggagtagaggagaaagtctcgagagagcgagcgccccagctgatcccgtcgataccctcgtggtggtccactcacgggcagcagtgaacagcttcaacatctgcgggcatttgcgggagtcgccagccgatggcgtcttggcaagactgtgaatgcgttcaatttgttaggtaggttgaagttgttgcggattatacggatccccactataccacttgcagttggagtaagacaaaaggtgaaagagaagaatctaggcctcagttgagaatatacacacgaccaacaaggtggcttttgccgcccagctgagtgttgtcgttgcttccatctctgcgtgagcagcaccaagaggacactccacttcaggttatgagcccaaggctcacgcgtggggagcacagcaactaggacgtcatggcggatcagaagaagacgcccaaggagtcacacgaggagaagaggacgatcccgccgtttaacggcaaggactacgaggtctggcacgagcgagtcaagctcaagctggagaggaagaagctgtggaagtactgcatggaggacttgctcgagccggacgagagcaaggaggcagaggcgcacgcgacgtggacgagcgagatggcccacgccaaggagatcatctacgacgcaatgacgaatcacataatgaagactgtgaagtatgaacccaccccgtttcgtgtcatggagcgcctgaaaaagagatttatgggcaagacgtacctgaagtacgctgaggagagggccaagctcagtcggctacggctcgctcccaacggcaatgtgccagatcacctgagcgagatgcgtcggctgatggagaccattgctggagtcgggcgtcctgtggacgagtatgtaaagcgagcactattgattggatctctgccgcgcgaatatgatcatgttgtacagacgtttctcgccagtcacaagccccaaaatgctgatgatcctcctaattatgaacaacttgaactcgcattggagatggcttacgaccatcgccaaggtcggaaagcagagggcgccaaggacaatgatgatgaagaaaaggcgttctttgctggtggaggaagaggtcgaggacgtggtcgcggccgtggacgtggtggtcgatctggaggacacgggcgcggttccggtggtggacatggttctggcggtcgcggcagccaaggtggtgggcgtgtaactggacgtggccaagccggcagtggacaaaagccaggtggtgcttgttatcactgccatgaagcagggcatcatgtgtttgattgcccgtttcttggcaaccgacctccagccgaggatcgcagcagcacccaagctcagaagcgcgtgaagatgagtggaggaaagagtgctaaggctgctgaaacgagtagctacgctaatgaaagtgatgacagcgcgtatgttattcttcaagtgatgaaaatgaaaaagccggtcgcagacaaagcccatgataactggtacctggactctggtgcatcgagtcatatttcgaaccagctcactgatttcatggagttcacgcctctaagcgcccggattcgagttggaggaaagaactcgctgggtgttgagggtattggtactgtggttaaagagctggagactactggtgggaggtgctcactgacgctgcgaggagttcgttatgctccagagctgcagtgcagtctctattctgtgcgacggcaactgaaccaatatctgcctgaacgtgatcgtgtgaaggtgcactttgatgaggcagatcgcgctgatgttatcttacaggctggtgtgactaccgctcaagttgattataccaatctctatcgcttgaagttggagagaccccaagaggtagccatggtggcgctaccagctcgagtgagtagtttggagctctggcattcgagattggggcaccctggcaagaacgcgtttaatgcgctgttcagccatgatgagtggccgttgccatatgtgaacttgcgtatcccggtgggtttcaattgcgagacctgtgtgacggggaaacttacgaggaagagcatgaataagtctcggacacagacccgcgagtggttagttggcgaaaaggtccatgtggacgcttggggtccactcctacggtggtaaacggtactttgccgtgttcgttgatgatgcgagtcggtttgtcaccgtgtatcttctggagcatcgttcggaagtgtaccaaaagtttgaggagtactatcaacgcgtcaagacgcagcagcatgtcagaatgaaagcgctaaggtcagacaatgcaaaggagttcaagaagctgcaaagtacgtgtgacacgaagtatggtatggagtttgacagcagcatcaagcatactccggagcaaaatggtgtcgcggagagaatggtccgcaccattacggagagaatgcgatgcatgctcgtgcacttcgacctgcctgaagcggtgtggggtgaggcagcgatgacagctgcatactccgtgaacattatgccaagctcggttcgaggcatggaggtaccgtatgcagtatgcaccgtcagactcctgcttatgagaagttgcggacgtttggctgcgccgtcctgtcgtacatcgacaaggtggagagacggaagatgcaggcgaaagcacgggaggcggtcttcgttggatattcgcgagagaagcgaggctatcgcttgctcgatagcaagaccaacaaggccttctacagccatactgtcgtgttctatgagaataaagctggtcgattgctcatggactcggcatcaacgccaagtggagcctccggtaaggaatatttaggcgttgatcgatcagtagaggatgacattgagccaatgctggatgaaatgcatgatgactcaaatgatggaggtagttatcgtgatgatggagattgctggactggtggggccagcgactccagagacggaggtgattatcggactggtggggctgatgacacccgatgtgatgaccgaccaggtggggcagttgagcaagatgtccggtcagatggggcatgtgggtccaagaagagaggccccggtggtgatgccgcagcgcctcgaccaaagagagtgcggtttgcggtgtttgaaagttgacgttctagcaaggtggcagaacgagatgaaggacgtggagtgagctctacagcatctggatgtgatcgttctagcaaggtggcagaacgtgatgaggaacgtgtcaatggacatgaggcagaccacctgcgaggtgagtgcgtgccaggcaattccaaaagaaggagaaagaggaaacgcagcagtgggcggcacaagggaccggctgctgacgagacgagggctctaccagggagtcaagaggtggaagaggtggacagcaggtcatcggctgctgagcgggccgactcggacagccaagtgtcgagtgatgctgcgagtgtggggcgtctatcaacgcctccttgcacagcacttcgtgagtacacaggcccgagaggcactcgccataaagaccctccagtgacacggagcggtcgggtaagtaaaccgcccacgtggttcggtgactacgtctacattgcctaagaaaatacaaatccagatgacgatgtgaactcgttgcctgctggatggaggaaagcacgagctgagttgcaacgtgctatggcgaacgagttgatccttgcatggtgggaggactattgctgcatgagtactggcgagtttgaagagccagatactttcggtgacgctatggagagtgagcactcattgcaatggaaaaatgcagctgatgatgagtttgattcgttgatgaagaacgatacctgggagttggtgccgcgcgagaagcacgtgaaagtgctgcagaatcgctggatctttcacgtcaagtatctagcgaacggagagatcgaaagattccaagcgaggctcgtgatcaagggcttcatacagatttatggtatcggtgtactcgcctgttgtgaggctggagacactgcgtgttctcttgacactggcggctgtctgggattatgaagtgcatcagatggatgtcactactgctttcttgaatggggcgattgacgtggaggtctatatggagcagcctgaaggctacaaagtgaaaggcaaagaggactgggtgtgcagattgaagaagagcctgtacggcttgaagcaggggcccagagtgtggtttcagctgctcaagtcgttcttggaggagcagggcttcacgatgctgcagtcggaggcctgcgtggctgttaaagtaattgatgggcagttggtcttcatccctctctatgttgacgatctgattttgcttgctccgtcgatggagctcatcaacaagatgaagaagatgttcgaggaccggtttgcgatgaaggatctcggggagttagactacattctaggctgggagatcacgcggaaccgggccgagagaacgatgttcattggtcagcaaaagtatgccgagaccgtgctcaagcggttcaacatgcaggactgcaatggctgcaagacgccgagcacggcggatctgaagctgagcaaggccatgtgtccgaccgaaaacgatgaaaggcaactgatgagatcgaagccatatcgtgctgtggttggcagcctgatgtacctgatgctcggtacccggcccgatctggcctacctagttagggagtgcagtcagttcttggaaaacccaggtctgttgcattggagagctgcaaaacttggattgcgctacctgaaagacacagcggactgggggccccagcttggtggcctagcgtggtcagatcaaaagctggatgatcatctgagagcatacgcagatgcggatttttcaaatcgagttgatgatcgaaagtctgttgcaggctacgtgactcaattttgtgggagcatcatttcgtggagcagccagacggagaagaccgtcgcgctgcacacgaccgaggccgaatatatggctcttagtctactggtgcaggaggtggtgcacttgcgccaaatgctgaaggagctgcaggtgcagcaaattcagccatcccaagtctttgttgacaacgaaagtgcaaagaagcttgccagcaaccctgtgtttcattctcggaccaagcacatcgatgtgcgccaccacttcgtgcgtgagcgcatcgatttgaaggaaattgacgtgcttcgggtgccaggcgttgataacgtggccgatgcttttacaaagccattggcacgtccggcatttgaaaaacacagagctgcaatgggattattgccaagggcaagatttggagatgcaagttgatgggaatccgtaggtggggctgttgcggattatactgatccccactataccacttgcagttggagtaagacaaaaggtgaaagagaagaatctaggcctcagttgagaatatacacacgaccaacaaggtggcttttgccgcccagctgagtgttgtcgttgcttccatctctgcgtgagcagcaccaagaggacactccacttcagaagtgaagtgatatgataattacatgtaattgcaggtggctacgagcttagtatgccggggcggtggcctcgtgcacggtacactcgagcgggcccttgatgggcagcgtgacgctgtagtcgtacgtgatcttgaacgggtcctcgaccgtcttgatgtcgaagcggctgaagagcacggcaatgaccgtctgcatctccagcagggcgaagcgcatgccgatgcactggtgcgggccaccgccgaacgtgatgaactggaacgggttgacgaacttgatcttgcccgtctcctcgtcgatccagcggtccgggttgtactcggcggcgtcctcgccccacaccttcttgacccgcgcagcggcgtacaccgacatgaccacatacgagccgtagggtacgaaagtgccctcacggagcgtggtcgaccgcatgggcgtgcggtggacgcccgtcatgtacagacgcagactctccttgagcacggcctcgatgtacggcaccttggccaggtcctccatcgtggggacttccagctcgcccgtcataaggcccggcagcttctcgcggatctcggcacgaagcttggccagcacgcgcgggtgccggttgagattgacgatgacccaggccaagctgaagctcgtggtctccttgccggcgaggaagaagtccatcatggcgtcgcgcaggtcggacgagtccgtcttgcccgtggtgtccacaaacagcgtgagcaggtccgtcttggtgttccagtcctcggcggtcttgctcgccatcgacttgagcatgacctcgttcagcagctccgtggccaccttgatgcagcgcttgagcatgcgctcgtcgccaatgttgaggaagcgcttgagcttccagtaccacatgggcgactgcaggcgagcgccgaacacctccgcgtacccgtcgacggcctcgatgaacgggtggtccatctccgagttgatgtcgccgtccaggccgtgcaggtccacgccgaagccgatcttggtgaacacgtcgctcgagaacttgcccagcagcgacttcatggggacgacacagccttccttggcgcactgcgccagcacgtcgcgcagcttgagggacttctcgcagatgacctcgtccatgacgtcgcgcagcatcttcatggagaacaagtggctggcgatgcggcgctgcttgagccacttctcgccgtccacgccggccacgccctcgccgaagatgtcgtgctgcaggtcgacgagctcgtctccacgtccgaagttgtcgaactgcgccttgaagacgtcctcgcaggcctcgggggacgtgagaatcaacgtctgcgggcgcccgatgatgctgagcacccagggcttgccgtcgctgacctgactctgctcggccatccagtcctgcagtcggtccttctggaagtacatgacgtccagggtgttgcccagaatcggcagcgtcgacttggggcggtgcagcccctgggcgtccagcgcgcgcgtgatcttcagctccttgtacacggcgaccagcagcttgtagcccaggtagaggccgctgagcgtccccgcggcgagcaccgcctgccgttcgtggtgctgcgagatgccccacatgctgcttggatccgatcgaagtcaaactgcgaggcgcgaggcgaattccaaaatgatgcagctccgagtcgagtcggcagcaatggccagcgtggcgagcctcgcaccaccgcaaggatcagcatgactgaggttgccgtgctttagcgcaggcgccggctgggcaacccatttcggatcgtctccagcgtgtctcccgttatctaatcgcgccaggagcggctacttcagatttgagggcgcgccgagccctgctcattggcccgcgtggcctcttcacttcaactgcagcgctactggcggagaagggacgtcgaggcaccgagccgcgcattgtccacgacaagcccggggtccaatgcgcagctgcaagcgccgacaacgtagcgctggctcagcgatcgatcatcgattgtccttcttgcaagttgaccttcccgaggggaagcattcaaaggtacagatgcacagtagggggctttggggcgttgagaaggcaaaaggtcaatgttacgtgcaagtactgtacaatgttggctgttgttgcctagtaggcagcgggtgtgatctctcgcacggtgacgttgagcgggcccttgacgggcagcgtgatggcgaagtcgtaggtgaggtcgaacgggtcctcggtcgtcttgaggtcgaagtggctgaacagcacggccatcgtcgtctggatctgcagcagcgcgaagcgcatgccgaggcactgacgggggccggcgccgaacgtgacgaacttgaacggggacacgggcgtgaccttgccggtcgcggcgtcgatccaccgctcgggtttgtactcggccgcgtcctcgccccagacgctcttcacgcgcgcggacgcgtacatggggatcatgacggcgcagccttccggcacgaaggtgccgtcactgagcgtcgtggccgtgttggccatgcggttggaggccgtcatgtgcagacgcagactctccttcgccacggcctccaggtacgggagcttctgcaagtcctccatggtcgggaccttgatctcgcccgtcatgagaccaggcagattcgcccggatctcgtcgcggagcttggccagcaccgccgggtagcggttgagattgatcaggacccacgacaggctgaagctcgacgtgtccttgctggccaacaggaaggacatgagcgtgtcgtgaaccgctttcgggtcgatgctcgtgttcgcttcgacgaacagcgtcagcagatccgtccgcttagcgtcgctgctgtcctggcgccgaacctccaacgacttggccagcacctgctgggtgccaccttagcgctttgtttgagtcgaccctcgtcgtcgatgctcaggaagcgcttgagcttccagaaccacgccggggactgaacgcgcgccccgaagacctccgcgtacacgtcgacggcccggatgaaggcgttgttcgagtccgagcacgggtcgctctccaggctgcggaggtcgacgccaaagccaatcttggtgaacacctcgcttgtgaacttgccgaagagcgacttcatcgggacgaccttgccctgcttggcgcactcggcgaggacgtccttgagcttggtcaccttctcgatgatcacttcgtccatcacgtcgcgcagcattttcatcgagaagagatggctggcgacgcggcgctgcttctgccactcctcgccgtccacgccggcgatgccgtcgccaaagatgtcgtagataacgtctcgcagctccgtgccgcgcccgaagttatcgaactgcgtcttgaaaacatcctcgcaggcctcgggggacgtgaccacaagcgcgtcggggcgaccgacaatgctgagcacccagggcttgccctcctgagaatgctctgctccgccatccagtcccacaaccgctccttctggtagaacatgacgtcgagtgtgttgcccagaatcggcagcgtcgacttggggcggtacagtccctgggcgtcgaacgcacgggccatgctgccggacttgtacatggcggagaggagcttatagctgacgtacaacgcgccgagagcgctcacggccagcgcggcttcgcgctcgctcacttggtgcttagccaacccccacatggtctgctagttgaaaggtctaggacgatgcttgaagtactcgctgcgaaatgcaaaatggggactgcggcagcgttggcaggcgccgcgcacgagctagctacacatagcaaagcatagcatacatgtacagtgtacatgtgtacattgtacacacaccaccgcaaccatcttcccggatgcaagatcagcttcactatgcaggaattatgcagccaagaggcccgtctgaagacgctgcagagctgatcatcaagcacacagacgacaaactcagcgtgagcgatcgatcaatcattaaggtcgacacaaatcgtccttgttcaaagtctcaacgctatgcgtgctcacgctagttcatgcacggaaacgttgagaggccctttcaccggcagcgtgaatgcgatgtcgtacgtgagcttgaacgggtcctccacagtcttcaagtcgaagcgactgaacatcacagcgatggcgacccgcatttgcagcagggcaaaacgcatgccgatgcattgacgaggccccgcgatgaagctgatgaacttgaacgaagatacgttcttgactttccccgtcttggggtcgatccatcgctcgggtttgtactcgtcggcgtcttcaccccacacgttcttcattcgagcggcggcgtacaatgctaccataatgccacagccaagaggcacgaacgtgccgtcgctgagcgtcgtcgactggtttgccacgcggtttaccgccgtcacgtacagccggaggctctccttcacgaccgcctcaaggtaaggcaggttctgcaagtcctcgtacgttgggacgtcgatctcaccagtcattagcccaggcaacttttctctgaactccgcacggagcttggccagcacgtcggggtaccgattcaagttgacgatgacccacgccaagctgaagctagtcgtctcactcccggctagcaagaagttcatgacggaatcgcggacaatctgcacgtcggtgttgtcgttcgcctccatgaacaaattaagcagatctttcctgccatggccgttgtcgctggtcttcttctccatggactttcgcatcacctcgtacgtgaagtcgtgcacaattttgttggcgtgtttcagctcgcgttcgtctccgacgttcagcagccgcttgagcttccacatccacgtcggggacagcagccgagcgccaagaacctcagtgtatacctccactgccttcatgaacgggtggtccatcttcgagtccacgtcgccagcaagattgttcaggtccactccgaagccgatcttggtgaacacgtcgcccgacagcttggccagcagcgacttcatgttcactacacgcccctgtttagcgcactctgagagtacgcctcgcagctggagcgacttctcattggcgactgcgtccacgacttcacgcagcgttcgggcggtgaacatgaggctggcagtgcgtcggtgcttgacccactgctcgccgtccgctccgacgatcccatcgcccacgaacgcgtagaagagctcgcgcatgtcggcgcctcgctcgaaagtctcgaactgcgtcttgaaaatgtcttcaagcgtttcgggggacgtgacgacgagggacgtggggcggtcgatgattcgcagcacccagggtttgcctccactgattgcactctgctccgtgacccagtcccaaagtcgctctctctggaagaagagcaggtcgagcgtgttgccgagtaccggaagcgtcgagtccggggagtggagcttttgcttcgtgagcgctgcatcaagtacgcgctgcgagtacagggcggtcgcgaccttccatcctgcgtagagcgagccgagcgtagcggccgtgaggagaacagcgctgctcgtcgtggcgtggttctgggcggtccacatgacgggaggcaaggaggtgaccttttgaccgacctttcagcgcagggacctgaacagtgctcgtgcttttatttactagttcaactctctatggttcttctgtaaaggaatttagattgccagattcgaaggatcagatcgctatcctaagagcgcagaagaggtaaacacgttacgtaggagcctcatgaacatcctatttgctctgcaaccgataggacaaagtctagcacacaacaattcgagccttctgttgagatagcgcatttctgattagagtttgtcctaagtacatggagttcctttgtcttttaatttgatttgattgcggtttagccggctaactgttcccaaagccgcgctgagcgcggcccgcctacgggtatacccgcgacagcagcccattggagttcctttgtctgccacggacgcctcgctcacgcaagttcatgcacggaaacgttgagaggccctttcaccggcagcgtgaatgcgatgtcgtacgtgagcttgaacgggtcctccacagtcttcaagtcgaagcgactgaacatcccagcgatggcgacccgcatttgcagcagggcaaaacgcatgccgatgcattgacgaggccccgcgatgaagctgatgaacttgaacgaagatacgttcttgactttccccgtcttggggtcgatccatcgctcgggtttgtactcgtcggcgtcttcaccccacacgttcttcattcgagcggcggcgtacaatgctaccataatgccacagccaagaggcacgaacgtgccgtcgctgagcgtcgtcgactggtttgccacgcggtttaccgccgtcacgtacagccggaggctctccttcacgaccgcctcaaggtaaggcaggttctgcaagtcctcgtacgttgtgacgtcgatctcgccggtcatcagcccaggcaacctttctctgaattcggtgcgtagcttggccagcacgtcagggtagcggttcaggttaataaccacccaagacaagctgaagctggttgtgtcatgacccgccagcaggaagttcatgaccgaatcacgaacaacctgcacgtccacagtgtcgcctgactgcatgaacaggctcaacaggtcctttcttccttctccatgggagtggttagagcaaccataagtatggttgcttttagccattctgagacatgtatggttgcttttagggatttcaaaaattacgagcgtaatttaaatgtctaaattaccattaagcccttaggtacgcaaatcacgctaaagtgcgcttctgattaggtacgatgccattaagtgcgccacctcacagccgctcattttaagaatcgcgctgctgaacggaggccacgtggggcacgcacctctcgcgaatgagtcaagcaccaaacggcgaggggggaccgatggctcctgcggggggagccattataaacggtaatcagtatgctccatgttggtggcaacgagagtatctacgtgcctcacattttgtttgaattctgtcggtatgtattgtttaggccgaaagctgcggaacgtaaacgaggagctaaactacatgtacgccgctctcgggattgaaaaagacgacgacgaagacgaagactttgttctggatgaggaggatgaggaagacaacggcgacgaagaggcggaggattgctaccaagaggaggaagacgaagaagaggtcgatgatgacgaggagagcgatagcgatgaagaggatggtgacgacgatgaagaggaggcgagtgacgatgaacaggaggcagacgacgacggagaatccagcacagaagacgaagcagaagcgggtaagactcgtttggattattgttgatacttattgagttgaactgataatgtattgtgtattgttttagtttgtttagaacgcaggacacgcaaacagagccccgagccgagaaagaaagccacagcacgcaagaaaacaccaggtattctcgttaaagttgttttaagcaaaaaggttgcgctatcattaatattgacattcactttggaatcgatagataccgcctggccaaatgcaagctttctgctggggatgaagaccaatctttcgcggaaaagcgtaaggcggagctgcagcttcacgagtctgtcgacgctgattcggccccacgtttatccaagcggaacaagcagtacataccgcggaagcgatcaagcaagcaccttgacgagttgcgggagatcaacgaggagcgcgaagaaattatcaaccccgttccgccctttaccccagcgaatatcaagagttggagcaagttcaacgcacacttgaaaatatacaagcagaagcaccacctcaagtttcgagtacgaagctcggagacacgaaatcagtacaacaggtatgtgtgacctctgtttgatgagaaatttaagttattaacgaaaccccctttcatatgcagcaatcatcgggaccaaatcccttcacgttttaattggagtcacaaggtcctccgctgtacacacggtgtttcgcaagcgtcgcgctccaagggacatcgcaatagaaaagcaactattgcgggtgtcctgcacgcatgacaccaactgttcagcggatggaaaatggcaaatttcgaattgtcataagaaacgaggtatctgccttttcgtgtatttgtttgctttgttagtatttctcacatgtcgctgttgataatcagaactttacccacacgcacccgaccacccgaacgcaagcatcgttgtacctgacaacaaagacacttccgttggacgagcaagatctcgaagatgttaagactttaacggatgctagtgtttcttccaagcacatcacgaacttcctgaatgagagaatcggtgcgtagttttatatatgatatgctgaagtgatacttacgttactgttcgcgctttgtgtgtttgctaggctgcaaaataacacctcaacagacccgtaatctgatccgcagtattatggggcacgacgcagcggaggcccgtttgaaagacatgctgcaagctatccgccagttagacggtagtgacgtccttgttattcaagaccaaatggacgtgacatgcggtatcgtgatgcaaacaaaggtgcagaagttgatgttcgagcgctggggcgacactcttacgatggatttcactcacggcacgaacaatttgggctatcacttgggtgcgtatgagttgttcggtatagcaactttatctttgttacggcaaccttgcgtagttatagcaaccatatcgatgatatagcaaccttattaacaaagtgattttctactgttgtgtgttggagtctggtcgtcacaaccgctactggtagagggttcccagttgtagacttcatatgcctcaaccaacgagctccgatgatgacaacaatcctggagtatttccaagagaagaacccaagttggcggatgatatcctacatcgtgatcgacaaagatttcgttgagtggagggtgctgaaaacactatttcctgctgcgaaagttttactttgtcaattccatgcaatttcgtactggaagaaggtgatgcagcgggccccatacaagctgaaggtgtctgaacgcgacgagttactcaacctgatgataaaatcgctgtacaggtacgcaacagattctatttatgattcttgtggtaacgctaacattggaaaacaaaccatatgcagctccacagagacaggttacgattctagttacggtgcattgaagcaatactgcgaagacaacaagaaacaagctttattctcgtactttgaaaagaactgggattcgtgtcgagaggcgaactttgctcacagcaaatttttcacggctgggaattctacaacgaacaggatcgagtcaaactggaatcaagtgaacatactgttggggcacaagacacgaattgacaagactattgcgggcttggtgcagcatcaaatcatgataactcagcagatcgggttcgtcatcgcgcagcaccattcgacttcgcccgttcctaaaaccataccgatgtttctccggacggtagcaactcgactgtaccctgacatcttcgagaaagtgagaaaagagtgggaacgatttgtgaacttcatggcagatgcgacttgtgagcgtacagcgtcgagtccttcacaatggaaaatttattgcgggaatcaaacctttcgctgtcacgatgtggagtggacgtgtacttgtctattttatagcagtcaccatttaccatgtcgtcatcttatgcacttagcgaggggcatggcttcaaactgcttccagctatggcaattcatgatcggtggagtacgtaccagaccttggaagtgaaaaacgaattgacggctgcagcgaaaatgttacagccaattgtgcagatgtccaagttaaggttgccgaaagtaaagttgccgaacgacactggggctgaaccagaacaaccactttatgctgcggggggtaacgcttcgccaaccaaagctaggaagcaagttgcgtacgtacggctacggcgaggtgaacgggcaaaccaggttgtattgtcttcagctgaaaaatacgcatacgcaaaagcgatgctggaaccgctattggaacacctgtcagatttgtctagtgcagacttctaccaagagctaagtgcctggaaggaaacgatcgacatagggctcaaccgtgtcaatcctgcccccaaccgagttctacagaatctgctgaagatagcaagcaagaagaagatgtatctgaacctgtctcagactccattctggaccccgtggaggcaatggggactatgacgctcatggacgcattggaaagcagccccatgaccatgaattatggcgattacgagtccgacgaaagtatgttaccgacacaacgcactcacctttcgcagtcatctccaattcgaccccccatcgacgagaaatctcatgacagctgcggaatgagtagctgtgacaaggtttcaagctctacgaagcctgacacagagtcgcgcgtgcgccaggtcgatgtcgttagagttcctaagccaccaagccaaggaaagtcaaggtcgactccgaaacagctgatgcaaactactatcagtctcaaagccgaccgtcttgctgttcacaagtaccccactgaacttgccgtgactttggatcagttcctggtttgggccagaaacacctcaaatctgaagcgcgtgatggagatgctgtcgaagtatcctgttcagctggaggatgcctatctaagagctcggaagattgattgtcattgggaaattgtacgacctgcggactacatgcacacatttgtaattccacaagaccttgccctatcaatgcaggcagcaacgactactacccggaaggagaagcagccaattgtactggattaaaaggccaagaagcaaggacttgttctcgacgtcgtcttggcgattgatccaaaactgtggaaatttagcgggtatggttgctttagcgatatggttgctttaatatggttgctttaacatgcttatgtttctagacaatatgtatgtgctctaacaggattctacgcgatcaaggcgaagtgtacctcatggttgaaggaccgaaagtggctggagcaagattggcgtaaagttgactccatcgtggatattttcgctgcggagacagcaactgcaggactaccgcgtgatgctgttcccgagcggcaccaaggtctagcgaacgaaattatctcaaagtttacttcaagtcggctacgcactgaatttgtgacgctctccaacaaagtcctgatcagctttgacaacatcgtgggagggatctgtcgtggatggctaaatgatagccctgtggacttttgcttggagacccttacgagatcggtggggaagtgccatgtgctgtcatcactgacatgggctatcggatggccaagtctccctaagacagcacttgcagcaacgaattttattatccactccgttaatctgcacgcagaccactggggggtaattatccttcgcctacgctacacagcaaaaacaagcaagcttcgggtgcatgtttacatgtacgagccgctcattgatgatgactatcaccatgaaatggaaatcgtgtggactggaatcccgaaagacaaagaaaatgaaggaaaggaggggcttcgtggttatgtggagcggtggcacaaggcttctgacccccgtggccatcttttcttcgatccgattgagtggatctgtgcccctcaacaacctgattttgctagctgtggtgtaatggtagtagtccaagcccacagctatcttacggggaacttgcagatgcaactttctagaatttccaagaacgacgtcaaggtgatgcgattgaaaatgctgtgggtcatcatgtgttactcccaagaacatcatctctctgaacgcgacgtcgctaaagctagccagattcatcatcagctacagaaccagctctgagaaacaccacagtctgtatttacctttaaatacagagtctatgctgcattagtctttcatttctcgcaccgccagctccagtagaacatcgagggaagcagcgtcgtcctctgcagtgagaccaccttggtcggccccttcatcgcccaagacggctgctaacgcatagctgtactcttcgcgatcttcgacgagggcttggatttgtagctgcgctgccagaagcttttccagatgctcggtgagctcatccagcttcttcttgaggagtgcaatctcggcgattctcgcgcgcaccagctcatgtgccagcgatttcttctccatttttgctgtcgctcaaaatctgctaagtgttgaaaatgtgggacacatattgtcatgtgtttcacgtattgctgtgtagagaacatcagttagacgccaccacgacgtgtctaaatttagagatatatgtagcaagaccatgacgagggcgacgtgtccctgtcatttacgcgtcatttaaaataaattaccgggtgccagctggttttagggttgctttaggccttgtggttgctttaatttctgtcgtgttgtcgtcatatggttgctgtaacgccattccttctccatgggttttcttctccatggactcgcgcatcacttcgtatgtcaaatcgtgcacaattttgttggcgtgtttcagcgcgcgttcgtctccgacgttgaggaagcgcttgagcttccacagccaggtcggtgacagcaaccgagtgcaaagcacctcagcataaacctccactgcctccatgaaagggtgatccattgcggactctacatttcctccaagactattgaggtccactccgaagccgatcttggtgaatgcgtcacccgaaaacttggtcagcagcgacttcatgctcactacgcgcccttgcttggcgcactctgagagtacgtcccgtaactggagcgacttctcctttgcgactgcatccaccacttcacgcagcgttcgagtagtgaacatgaggctggcagtgcgtcggtgcttgacccactgctcgccgtccgctccgacgatcccatcgcccacgaacgcgtagaagagctcgcgcatgtcggcgcctcgctcgaaagtctcgaactgcgtcttgaaaatgtcttcaagcgtttcgggggacgtgacgacgagggacgtggggcggtcgatgattcgcagcacccagggtttgcctccactgattgcactctgctccgtgacccagtcccaaagtcgctctctctggaagaagagcaggtcgagcgtgttgccgagtaccggaagcgtcgagtccggggagtggagcttttgcttcgtgagcgctgcatcaagtacgcgctgcgagtacagggcggtcgcgaccttccatcctgcgtagagcgagccgagcgtagcggccgtgaggagaacagcgctgctcgtcgtggcgtggttctgggcagtccacatttactaaagtgtggcaaattcagatatgtggaccgccaagagctgtattccatggtagaaccagggaattgtgttttccacttcaaaatagtactttcgatataccggtacacaccggtattataccggtaaccctgaccgcccacagtccaaccgatggacgcgtggcgttctcccctcacttcgaatcaagaccaacaaacaagcaagcaagaagggggtcattaacctctcaagactacgtcatgatcacccgtggaaccaccgaccaagccggcgcccccagctcgccatcacccaggaccgagacggtcccgtcggacagcgagcgcccgactgccgtcgctgccgcggactcagcccctcctgatgttgtggacgtcacgggcgcggacgaaccatgggcgagggcgcctgcaaggcgcacgtccgaccccgccccgctccgcacgagcaagcgggcgacgtcgaaggtagtctccggtgaagccctcacggaagctcgcaagggcaaaaagaagctggtcaagcggccgacggcagggaccagcggcgaggcaccacggaaagcggtggccgacggcggccacgactccgactccgacccggaggacaaggtgccggcgccgcctgcgaagaagccgcgtaagactacgactccagcgaagacgaagccagcgaaggccgcgacgacctcgaaatgtgcggtgccgacgccgagatccgacagcggcttcgacctgagctccttcatggcctccttctcgcccggcactgcgctcgaggcgactgttgcgcccgtcgatgggagcaccgccgtcgcgacgacccccaacgaagcctcggtggcgaccgacgacatcgcccctcaggacggcgttgctgttcgtgcgcaattgcaagagctgcaagatgaggtggaacgtctgtgtgcgctggtggccgggcaagggcttgctcagctccctgtcgccgtcacgtcacgcctgcatgcagacccctcggctcccacggctcctaacaacaagggggagatgccgccggcggagttgcggtacctgacgacatcaagcttccccgaaggtgcgaagaaggcgaagggcgactacaacccaccgcaagctcatcttctggcggcgagccggatgttccgcgcattcggcacggagacaggtaagcccctgtctgcgatgtcgtttgtgttatggatgcgggagctagaggcggtaaagtttcaagctactcctgcggtgctgatggcgatcttcagtagtcgtctggggtcacgtgggctcactgtgatgcatttcaaggagtcgtcggagatgtcgtcgctggaagctggctcgtcaaacgcgaacttctcgagagactttcggcgcgcgagcggaaaattttccgtgagagcacctgttttgcccttcgtccgacctcttccaccaccggaacaccgacttcaccaggtagccacaagggcaccagcggcactttgaccttacggtccgggtcggccatacagccacctacagctatacagctacctttgactatacagtccgggtcgaccatacagtcacccacggccgtacagccagtgccggccatacagccggtacaccaattaaaccatatacgtggagcgtcacctctcactatatcacaagatgttaggtgtccattaccacgtgggagtgagttgagaagcgctgcgactcagccggcctcgcggataatcggctcgccggggtcggcatcgtgtaccccggaccaaggaagtacgggtcatcctctagaagaagccaagttgcgcaacgatatcgcgccgcggccaagctacctgcgccccgtcgtcagcgtcaagaccgatgcaggcatgcacctgaacgcccgtgcctggagcgatttactgcggatgtctcggagagctactctggctcaagctatggcaaaatatggcatcgcgctgccgccggacaattatccgctgtcgcgaccaggcgcggcgggacccgagttccttctggacaccccgttgcaaaaggcgctatcggaatatgcacgacagtcgggcatgatactgccagcctttgtggagctggtgcgcggacagacggctgatgactaccggcctaacaagagcctggtcccaggcgtgctgaacgaagtatgcaagggttacgcacatctggaagagctccagagaatcgtgcagggcggagttgaagttcggctaagcaagacacctccacggcaggtacagcggccaccaaatcacggtcggcgcgagatcgccttaatgtgctccgcaagaacattcgcaaggagcaggatgctgggcggtgcctcgtactcgaccgcgatctcctcaagcaatggcccgaggttattatcagccccttcggggggggggggggggtggacaagggcaatgaggacacaaacgtgtcgggtaggacgatccacgatctgtcataccccgaaggcacttccatcaacgactacacggatcaggacagcatcaccaagccggagtacactcactgcgacgcggtggcggccgaaatcctgaggcccaagcgcgctcacccaaggacccgggtgtgtgtgatggctggtgatgtggcgtctgctttccgcaacatcagcattcacagcaacagcgtgtatcttttcggcggccacatcgaggaggacgatgtcatcgtgatcgagctcgctgcgccattcggttggactggatcaccgggtttctacgagattgctggtggttctgtcgcttacgtgcacggttcacacacgactggcgagtacccgggtggtgtcttcaattatcactgggttgacaaccacatcaatgcggctgcggacattggcacctcctgcgaggacgttgatcggtccctacggtacgctatggtagcagtcctgggagctgacgctatcaacactaagaagttcaccgactggaacacacgccaacgtgtactgggcctcatgttcgacacggtggcggaaacggtctcgatgccaacggagaagataatcaaggcacgctgtattgtggcggctgcgtactctgcttcatcactttcaaggcaagcctaccggtcgctgatgggtagcctccggcacgtcgcaacatgcatccgtgctgcacggccgtttctccagcgtctgcgccgacgcgaaagttatcttcagcggtttcagcgtgttccgattacgccggacatgcaacaagacctgatatggtggtggtgtgtgctccacactccccgcctgaacggcgtgtcgctggaatacttcaatgctctcccagtacccgatattgtagtcgaaatggatgcgtccgattatggcctctgcgcgctggatgtatcatcgcaagtggccctcacgtaccagttctcggacagcgagcgtgccttgattgcggcttttaagaatggcacgcccaacggcttcgatatcaacattcgggagctgctctcgtgcgctttcgcggtccacgcatggggaggcctatggggctccggtgcctcgcgcaacgatcgcccacgccacgttcaatttcgcatcgacaacacttctgcggtcgcatgacaaaacaagctcgcgtcctgtaattcacgcgctcaagtgattatccggctacttagctggtgggagacttcgttccagcttcggttttcggcgtcgcacgtggccggctctgacaacgaacgcgccgacgctggctcccgcattgccgctaacccatcgtatgcggtcaaattctcgtcactaactcccggatggtcgcaggtgtcgccgacagtggatattcaaggtctgatcgatatctggcagcgtatctccgagcgcaccccgttgccgactccacgttcgagcaataccgccgagccttgaccaagtggacgacctggacgtcccaccagggcattgcaccctcgcttttgggcatgcctctcgctgctcaagtgcagcacatctcggattttattctccacggctttcggtgtggcttcgggtccgggggtcccattcgcagcgactcgatcatggccgtgctcatcggtgttcggcacttcttcgcggcatctgatcatgacatcccgatcgcacacccgcgcattcgtatgctgctcaaaggcatcagccgtctcgattcacctccgcgccggaaagcaccagtgtcaatcggactcctcgaggtgtgcttccgcaacctttcaatgcctgagcccttcgagcaagccctctggggggtcatgtgcctggcgttctttttcctccttcggcggtcggaaatcgtggcaattactggcggttcgttcaagtgatttgctgttcgagctcaagacatcgcggttctggatgcggaaggccagccaaccctgtccccatcgaaggcacagtcggtgtgtatgcgcctgatcggctccaagactaaccagggcggctctcctacaacgaggatgttgtcgcgctcgggacacccattcttgtgccccgtgtttggtgccttgatccttctccaagtccggaaacacctacccgctgatataccggctgcagtgtacctggaccgctgcggaaaaccggcctgcattgcgacggatgatgtgtcagaagctatcaagcgggcggctaccagcactggcgaagacccacgctgtttcagctcccattctctacgagcgggcggagcaacccacacgtaccgagctggcacggatgcactcacgatccagtttcacggccgttgggtttccgatgcgttcaagacctacactagactctgcaaggagtcggttgctactctggcggcaaacatggtaacaggtccgcgaggcgattcgacgttgcattagtggggctgattgcatgaccatttgggggcaccgctctcctcgtcccttatcggactgagctgatggtcatcgcacaagctcccattaatgaaacttcgtttgacccccaatgtagtggaaacaggggagcttgcttcccgcaaggctgccgtgccaaccggctgtccctgtcaaaaaaatgcaaaaggtttgtttggtacgagtcaaaagttttcgttttattccaatgcaaacaaccaaatcgaaatagccaacggggtgcacactgtatgaaccttcctcggtaatgggggcaccaaataggaaacagtagctcgctgcgctcgcgagatctttcatctaaggctgaaagcacatcgacaagagctatcactgggatgacccgaagtccagctgtacgttgctaagttgactttgtcaacttagcggtgtatttctctcgcatctgtcaagctttgaaagaactcatttctgaaacaacaaacttcgagatgtactttaggcctgcctcgaccgacgtctaatattgaaacgcaacaatgaacttggatgcctgtcgacaccctctctatcggtgccttacacgctatactaccccacaccgccatttgagcagcagtgaggtggacacctgtctaccttctcatcggtagctttacaaactatcgttttcaaacgatctagatctggcccacaccaaagttctggctggtggtgccgaacttcttggcggacgtgggcttgtagtagctggccaccttcttggagttggccagagccgccgactcgcggtagcccgtcagcgtaccgcagttggacacgacgttctcgacgcagttgcggcccagcgcgttcttgcacgccgactgcatggtcgaggacggcgcgatgatggcgcccacagtctcggcgtcgtgcttgttagggatggccgtgttctcgaagtaggtgccctccagcagcacgttgccgttctgcagcacgtcgtatgagaagcccgtgttgttgacccagtagttgttgacagcgtggacgatcgagttctcggcgaccttgggcgagcggcccgacgtgttgtgcacgtagttgttgacgagggtcacctgcgtctgcgtgcccaggaagaggaaggtccagtagtggttgccgtcgcacgtggccgagtactgcgtgcggccgtcgaactcggagttgctgatggtcatgctctttacactggccgagcccgtggcgatcatctggcggccgaggttggagatcttaacgtggtcgatccaaacgcgctccatgggggtcttgccgccgttgaggccctggatgtagatagcgtcgccgccccagatgaggtgcgcgttgagctgcgtgatgtgaatgttctggatgatgatgttgttgccgcggagccacagacccttgcccttgatcactccgttcgttccgaggccgcgcagggtcttgttgtccgagacgatgagcgggttcttggtggccgcgatgtcgtacgtgatcttgacggacgtgccctgcacgcagccgcccgtgttagcgaagccgccgctctgcaggatgacgtcctggcccttgtagccgttgttcttggcgaggcagtcgcggtggctcttgggacggcagcccgtctcggtcttcgtgccctccgagccgcggaagtcgaaggtcttggtgagcacgatgacgcgcggctgcgagtcctggaggtagttcctcaggtcgttgagcgacgcggggtacacgggggcgatgttgccaccgccggtggtgccggcagcgaggcccggggcagagcccgtggagattgagctcttggtggtgacaccctgtttcgtagacgtctgggcgacatccgagttctgcagcgccgtcgtgctagaaccggcgtgcgcgccctgcatggcgaacgcggcaacggcaacgataacgaggcggaagatctgcattgctggctgttgcgcggtgttggttggagacttgtgctgcgcgaaacgaaatcgataatgagcaacgagtgccgtggtgtgtgtgtgagtcggaagggacaaactcgagcaacgtgagtctcgcacgaaatacgcctcctgacgtcgcgcgacgaacaggtcgatagagggagtgggtggcaagcggtgagcgcgtgacagagcaccaattcgttgaggacttgatacagggagttgcgttacatgtgcgtggccaaacctgctgggatcgcggcagacccgaggcgacaagcaaacgctcaggcgccaaccactctaccgtgtactagtcgaacatcaaaagccacagctgcgctgatagttgatagttgccgtaacaaatgtccaagtgtctggtgaaaacttgagcctcaactttgggggtcgaattcgctcattcactctaccacctcgtcatctgacaggagtgtcgctttgcatggagcacgttggaacaagagtcctccactagagcgaccactctacggaatttctctctttcgacgcccgcgttacgctggacggcgcacaacaattgacaacggaaatccacacacgccaaatgcggtagtcgctctttgtagtcagatttgaagagcatagccatcacccgcgtctatgaagtgttcgcaaggagggcccttgtggcccagcccccaagctgcttcgacagaatcggctgggcatttacaggctgcgaatcacaactctctctgtcaacctcgctcttaccttcccggctctacatgtattaaaatgccaggtaaagttagaaagagtacggggacgacgatagcgcggttttgtgtgtgtgtgtgtgtgtgggggggggcaaaagagagctggctggctcaatccaacgatctgccaatgaggtcgtttctcagatactgtacaaacacatatacaagggtaagtctcctgagttgctacagcattcattgccttgtcaagctcacaactcttacgagtattactagaattttcatgaagctccagggtctcgatcgcttgtcgtgactaattgggcagcttgattcgagttcaaagaatgactgcagataaaccaagggtacaagtaccactcaatttagtactgtaagcttcgcgttgtccgcaagttcgatgaattcaagctttcaggacaacgaggtcaaagacaaatcgtgctgcacatgttgccttaggggtaggcctgtcaacgttttgcctccaatccgcgcaaccctcaaccttgtgcataagtcccaaaaccagtcaaaaccgacaaaacccacactaaaacttttccatagtttatttcatatattctcatttcgaggtgctcagtgtcccgtcccgtgtgaacaggccaagctcgccctctcaaccagataaggctcgtgacaccaagcgatactcaccagaaaaagaaacctggcggataatacgccggcgttggtacaacatgtccaccacgttgttgagcagacatgcttacatagcagtacgttcctgtatgcgcatgtataattcgctccagatagcaaacgcaaaaacttggcaaaacacatactaaaaactattctgatttaagaggtattgatacaaacagctgctacaggacgcaagtttggagtctgttgccagggagtttagcggttttggacagtttatgtaaaacgtatttgcgagttgggggtataggcaaaacgttgacagctctacttacatgtatggttgcagcgaatgcaggccgccacagctcgatctggcccaaccacatggtcactcgtgcatgccatgcaacgcctgacaagcacacacacacatcatttgactttcttacgtgggacagccttgtattttatcttaaataggtgtcggacttcatggtctgcctgggctcatgactttgtggcaagttaattaatgacaaccaagtcgctttcaacgcaattttttgtctaggactggacagggtgtttggcaaaaaatgggatggagaggccccgattcgtgtatcgtgtaaaggtacatgtagtgtattgtggaaatcgattagattgtccgagcggattagctgataaagcagcgttcatgagagatttgactggtactaaatcggggatccttataattgcatatgtcattggtaagggtataaatcagtgtagcgttagtaaaatagggattgcctcattacccgccagccatacgcggaacaaccacctaccaccacgagctgactgtttcgcgctcctactaacgagcaatagcatcacgcgcattaaatacttctctgtgagcactgctatctatttatcaagttgtgaagccatatatttgcgctgtcatttctcgtcagcattagcgtttgtcggttttaccttaaatccgccgccgaatgccgagtgggtgtcggacattcgggctgattagcatgcaaatcagtcgtccagagctttgtaagccactgagcagctaaatcagcttgccacatggcgttgcaggcacaacagactgctctgtcaaatcagagtgcaaagcttaggctgtcgatctaattaggaggtcggatttactaaatccgacccgattaagcttaatcatctgcttaaccaaccgatttatattccaattagacaatctaatcggttcccacaatacatgcaaacttatgataacaattctgctcagaaaatcgagggctcgttctcagtcaaagaaagttacatgacagcagatggtcacttatcaggatgggaaacattttgaagttgttgtactgtacatgtactggtgtagcgtgctcgggtcgaatggcgttacaacaaccatatgacgacaacacgacagaaattaaagcaaccacaaggcctaaagcaaccctaaaaccagctggcacccggtaatttattttaaatgacgcgtaaatgacagggacacgtcgccctcgtcatggtcttgctacatatatctctaaatttagacacgtcgtggtggcgtctaactgatgttctctacacagcaatacgtgaaacacatgacaatatgtgtcccacattttcaacacttagcagattttgagcgacagcaaaaatggagaagaaatcgctggcacatgagctggtgcgcgcgagaatcgccgagattgcactcctcaagaagaagctggatgagctcaccgagcatctggaaaagcttctggcagcgcagctacaaatccaagccctcgtcgaagatcgcgaagagtacagctatgcgttagcagccgtcttgggcgatgaaggggccgaccaaggtggtctcactgcagaggacgacgctgcttccctcgatgttctactggagctggcggtgcgagaaatgaaagactaatgcagcatagactctgtatttaaaggtaaatacagactgtggtgtttctcagagctggttctgtagctgatgatgaatctggctagctttagcgacgtcgcgttcagagagatgatgttcttgggagtaacacatgatgacccacagcattttcaatcgcatcaccttgacgtcgttcttggaaattctagaaagttgcatctgcaagttccccctaagatagctgtgggcttggactactaccattacaccacagctagcaaaatcaggttgttgaggggcacagatccactcaatcggatcgaagaaaagatggccacgggggtcagaagccttgtgccaccgctccacataaccacgaagcccctcctttccttcattttctttgtctttcgggattccagtccacacgatttccatttcatggtgatagtcatcatcaatgagcggctcgtacatgtaaacatgcacccgaagcttgcttgtttttgctgtgtagcgtaggcgaaggataattaccccccagtggtctgcgtgcagattaacggagtggataataaaattcgttgctgcaagtgctgtcttagggagacttggccatccgatagcccatgtcagtgatgacagcacatggcacttccccaccgatctcgtaagggtctccaagcaaaagtccacagggctatcatttagccatccacgacagatccctcccacgatgttgtcaaagctgatcaggactttgttggagagcgtcacaaattcagtgcgtagccgacttgaagtaaactttgagataatttcgttcgctagaccttggtgccgctcgggaacagcatcacgcggtagtcctgcagttgctgtctccgcagcgaaaagatccacgatggagtcaactttacgccaatcttgctccagccactttcggtccttcaaccatgaggtacacttcgccttgatcgcgtagaatcctgttagagcacatacatattgtctagaaacataagcatgttaaagcaaccatattaaagcaaccatatcgctaaagcaaccatacccgctaaatttccacagttttggatcaatcgccaagacgacgtcgagaacaagtccttgcttcttggccttttaatccagtacaattggctgcttctccttccgggtagtagtcgttgctgcctgcattgatagggcaaggtcttgtggaattacaaatgtgtgcatgtagtccgcaggtcgtacaatttcccaatgacaatcaatcttccgagctcttagataggcatcctccagctgaacaggatacttcgacagcatctccatcacgcgcttcagatttgaggtgtttctggcccaaaccaggaactgatccaaagtcacggcaagttcagtggggtacttgtgaacagcaagacggtcggctttgagactgatagtagtttgcatcagctgtttcggagtcgaccttgactttccttggcttggtggcttaggaactctaacgacatcgacctggcgcacgcgtgactctgtgtcaggcttcgtagagcttgaaaccttgtcacagctactcattccgcagctgtcatgagatttctcgtcgatggggggtcgaattggagatgactgcgaaaggtgagtgcgttgtgtcggtaacatactttcgtcggactcgtaatcgccataattcatggtcatggggctgctttccaatgcgtccatgagcgtcatagtccccattgcctccacggggtccagaatggagtctgagacaggttcagatacatcttcttcttgcttgctatcttcagcagattctgtagaactcggttgggggcaggattgacacggttgagccctatgtcgatcgtttccttccaggcacttagctcttggtagaagtctgcactagacaaatctgacaggtgttccaatagcggttccagcatcgcttttgcgtatgcgtatttttcagctgaagacaatacaacctggtttgcccgttcacctcgccgtagccgtacgtacgcaacttgcttcctagctttggttggcgaagcgttaccccccgcagcataaagtggttgttctggttcagccccagtgtcgttcggcaactttactttcggcaaccttaacttggacatctgcacaattggctgtaacattttcgctgcagccgtcaattcgtttttcacttccaaggtctggtacgtactccaccgatcatgaattgccatagctggaagcagtttgaagccatgcccctcgctaagtgcataagatgacgacatggtaaatggtgactgctataaaatagacaagtacacgtccactccacatcgtgacagcgaaaggtttgattcccgcaataaattttccattgtgaaggactcgacgctgtacgctcacaagtcgcatctgccatgaagttcacaaatcgttcccactcttttctcactttctcgaagatgtcagggtacagtcgagttgctaccgtccggagaaacatcggtatggttttaggaacgggcgaagtcgaatggtgctgcgcgatgacgaacccgatctgctgagttatcatgatttgatgctgcaccaagcccgcaatagtcttgtcaattcgtgtcttgtgccccaacagtatgttcacttgattccagtttgactcgatcctgttcgttgtagtattcccagccgtgaaaaatttgctgtgagcaaagttcgcccacatctctcgacacgaatcccagttcttttcaaagtacgagaataaagcttgtttcttgttgtcttcgcagtattgcttcaatgcaccgtaactagaatcgtaacctgtctctgtggagctgcatatggtttgttttccaatgttagcgttaccacaagaatcataaatagaatctgttgcgtacctgtacagcgattttatcatcaggttgagtaactcgtcgcgttcagacaccttcagcttgtatggggcccgctgcatcaccttcttccagtacgaaattgcatggaattgacaaagtaaaactttcgcagcaggaaatagtgttttcagcaccctccactcaacgaaatctttgtcgatcacgatgtaggatatcatccgccaacttgggttcttctcttggaaatactccaggattgttgtcatcatcggagctcgttggttgaggcatatgaagtctacaactgggaaccctctaccagtagcggttgtgacgaccagactccaacacacaacagtagaaaatcactttgttaataaggttgctatatcatcgatatggttgctataactacgcaaggttgccgtaacaaagataaagttgctataccgaacaactcatacgcacccaagtgatagcccaaattgttcgtgccgtgagtgaaatccatcgtaagagtgtcgccccagcgctcgaacatcaacttctgcacctttgtttgcatcacgataccgcatgtcacgtccatttggtcttgaataacaaggacgtcactaccgtctaactggcggatagcttgcagcatgtctttcaaacgggcctccgctgcgtcgtgccccataatactgcggatcagattacgggtctgttgaggtgttattttgcagcctagcaaacacacaaagcgcgaacagtaacgtaagtatcacttcagcatatcatatataaaactacgcaccgattctctcattcaggaagttcgtgatgtgcttggaagaaacactagcatccgttaaagtcttaacatcttcgagatcttgctcgtccaacggaagtgtctttgttgtcaggtacaacgatgcttgcgttcgggtggtcgggtgcgtgtgggtaaagttctgattatcaacagcgacatgtgagaaatactaacaaagcaaacaaatacacgaaaaggcagatacctcgtttcttatgacaattcgaaatttgccattttccatccgctgaacagttggtgtcatgcgtgcaggacacccgcaatagttgcttttctattgcgatgtcccttggagcgcgacgcttgcgaaacaccgtgtgtacagcggaggaccttgtgactccaattaaaacgtgaagggatttggtcccgatgattgctgcatatgaaagggggtttcgttaataacttaaatttctcatcaaacagaggtcacacatacctgttgtactgatttcgtgtctccgagcttcgtactcgaaacttgaggtggtgcttctgcttgtatattttcaagtgtgcgttgaacttgctccaactcttgatattcgctggggtaaagggcggaacggggttgataatttcttcgcgctcctcgttgatctcccgcaactcgtcaaggtgcttgcttgatcgcttccgcggtatgtactgcttgttccgcttggataaacgtggggccgaatcagcgtcgacagactcgtgaagctgcagctccgccttacgcttttccgcgaaagattggtcttcatccccagcagaaagcttgcatttggccaggcggtatctatcgattccaaagtgaatgtcaatattaatgatagcgcaacctttttgcttaaaacaactttaacgagaatacctggtgttttcttgcgtgctgtggctttctttctcggctcggggctctgtttgcgtgtcctgcgttctaaacaaactaaaacaatacacaatacattatcagttcaactcaataagtatcaacaataatccaaacgagtcttacccgcttctgcttcgtcttctgtgctggattctccgtcgtcgtctgcctcctgttcatcgtcactcgcctcctcttcatcgtcgtcaccatcctcttcatcgctatcgctctcctcgtcatcatcgacctcttcttcgtcttcctcctcttggtagcaatcctccgcctcttcgtcgccgttgtcttcctcatcctcctcatccagaacaaagtcttcgtcttcgtcgtcgtctttttcaatcccgagagcggcgtacatgtagtttagctcctcgtttacgttccgcagctttcggcctaaacaatacataccgacagaattcaaacaaaatgtgaggcacgtagatactctcgttgccaccaacatggagcatactgattaccgtttataatggctccccccgcaggagccatcggtcccccctcgccgtttggtgcttgactcattcgcgagaggtgcgtgccccacgtggcctccgttcagcagcgcgattcttaaaatgagcggctgtgaggtggcgcacttaatggcatcgtacctaatcagaagcgcactttagcgtgatttgcgtacctaagggcttaatggtaatttagacatttaaattacgctcgtaatttttgaaatccctaaaagcaaccatacatgtctcagaatggctaaaagcaaccatacttatggttgctctagccactcccgctcgggtcgtcgttgcatgtacatgtattctcagccagcacagcgctacacgtaccttggctggggtaaggacgttcagtagctttgcatccatgcaactcaaaccttacacactggcatatttttcgcccaagccccgtgccccctagaaaagaagtctggttacaccctgaagttgtatagatttctgcgccagtggcttcctatttctgaagggaaatgcacgaaattggtgacggatatcagtaatttatactgggataggaagcgacgaagtgctgatagtcgggcgctgtcctcgacaccggtgatgaaccggtaacatgtctttaggtcaatttacagtcgattgaccgcgtgttttagacttcacaagaatgatggaggctggtccagttcatttgcaaattcgtgtgaccatagtggcgatacattgtcgggcagattgagtttatcaatggcggtcaaaggtgagttaaccaatcctatcctagccttcgcgaagccctagttcctgtaagttactgcaaattattctaacggatgttgtaatttaccgagcactattttgtgccctagcccccgtgcccccccccccccctgccgaaaaatggtctggttacgcccctacttctagcaactttttcttgcaactttttcgaaggctacgttagcctgtgaggttcgcacaccaccttggagatccgggaattggcaggatcagcgggaccgatctctccaatacaatttatgccgcgattttcgcacggccactccatagtaggctggcactaagtagtgtactccgcaaacatgttagtgattttacaatgcactaactcattgtaagtgctgattgcaaacacgtttgcatgtttgctgctctatcactagtattcgaaataatgactacagtactcaagcaaactgtgaccgattgtcgaatccataacatacttacacaccaaagtaaccaggtcattgttggtgtagagaagaacttttgttccagtcagctttcggcaaaaaattatcaaaatgaagggttaaaaatcgtctaattccgcaaacatgtttgtgtagtgttaatagctgtagagtttgtgcgagtactagctgataccgtgcgaatgcacccgaagcaacgaagccatatcctaggccttccttcccttcaccccgcgatgcagaacgaagcgggtttcttacagtgaagcaaattataaaccagtgaacatgaacttgtaggtgttcatggcttcaaccggcagtcctgagcgcccgctttggttcataattgacaccacaaacggaactaaaagagctgactggacttgctgtcgctcgcaagacgaagatatctttgcccagctattttccatctttggtttgccgcaccatcgcatgacgcatcatctcaaatgcctcgccaccaccttctccgtggcatttgcagacacgacgccgcacggtcgagatcatggtgcttcagctgttcgtgaatggcccgccgggatcgggcaagtcgacgctcgccaaactcctaagcgaggagttcaacttggagctcgtcgccaccggcgacttgttgcgtgagaatatcaaggcgcagaccaccgctggtcgtagagcgcagcgctgcattgcggcaaagaagctggtccccgatcgcgttgtgctcgatatggtggagaccaaagtggcgacctccctggcgcgtggtcgggctggctgggtgctcgacagtttcccgcgaactacggatcaagcggaagcgttgatgaccaagccagacctttgtcctgccgtcgtgatcttgctcgatctccccgagacagactgcatcactcgcatttgtggacgtcgcttcgacccggtgacaggatccattttccactcgccaactaaccttcctcgtgacgcggtagttcgtgcaagactcacacgacgccgcgatgactcaagcgaccgactttcaccgcgattcgaggcctaccggaccttcggtgaggccacgaacgagctatatgctagatctcaaagcgttgtgcaccgagttgacgcctccaagtcttcaagtgtgattctggaagacgtgtcagctttgcttcactcactcgtagcgaaacctcggcagattcacggcaacaacagcattatcaacaacaaccagacccagcaggtcgacaatatcgttgccaaagcgaatttccggcagcgaccggagaccattctggaaacatcagaggagaacgaagacgacgacatgcagcagtaccagtacgactgggaagacgacgaggcgtctatcagccgcagtcggcgtgaaagcccgcagaaacaacagcagcagcaaaaacagcccaaagagaaaatgactccagctcctaagaaggaggcacagaacaaccagctctcgtcatcccttatggctgctctaccccttccagtcctccttccaaaggcagaaaactccaacaacaataacgacacagttcctcctccccccgcgccaatgttacgccccctgccagcaccgacgggcaaattcagaggactaagcggaccaacggagattatcaagtcctcagtccagtcggtagtggtgcgtgattctatcagcgtccgaagcagtagcatttgcagcaacagcagcacgacaagcttggagacggcggcagcctccgtggatatggagacgttcaaggagctgctactggatgggttcgaggccgtcaagcacgggcgtcgtggtcgaccgcacccccgactcatcttcacagacttggacttcaagcgagtattctggcagaaggccatgggcgctgcagatcgagtgggcaaaggcaaacacgcgcgactcgagcagagcgtcgtactcggggacgtcattcaggtagccagaggcatgaagactgctgtgctcaagcggtcgggtaatgtggcgcgttatgaatgctacgtctccctcgtcacgccgacgcgcacgctggacttggagttgccgaacgcccagctcgcagactttttgcagcgaggcttcgaccagcttctccacaactgatggtaggcgttgtcgtactcgtggtgctctatttctcgccttacaacagtcttctgttagtcctgaatcaactcagacttcggtatgctacatagtttgtgcacacaatttctgtcgggctgcttcatttcttgttatggattccacttcgtgctttttggtgtccttgtattcattcgtgaagcgcagatagctttagttcgaaggcagctcctccacttgcatgtccgcaaacttctcagccgcctcctctgtagaaacctgtgggttaatacagacccgttcgccttgcttccaattcaccggcgtcgccaggctcttctcatccgtgagctgcagcgagtccagcaccctcagcacctccatgaagttgcgccttgtactggccggatacgtcaacatcagccgcactcgcacccgcgggtccagcacaaacagagtccgaacagtgagaggcatcccctgtttgtccagatcgtcttgggacagcatgccgagctgcgctgcgatggggcggctggggtccgccacgatggggaagttcactttagcccccgcgtacttctcgatgtcgacgatccagcgcttgtggctggccacgtcgttgcatgacagggcgagcagcttcactccgcgtcggtggaactcgccagccggcccacctcgcccagttccgtggtgcagatgggcgtgaagtcgtccggatgcgagaagagcagcccccacgagcccttgaagtacgcgtgcagcgagctggagctatcgtcgctggcgtcgaagcgcagatcggggagctcgtccaacagtgtgaccccaacgaggttgcgcatggagaaatcgcgaagtgagacgagagctgctcgacgcgcgcaaagctcgaaatggtcgtcatcagcttgacaagcatgcgagtagtgggtcatggaacattacgccggcagtttttttccttaccgtaatttaccaccgagaacattcctgaaaccttctttcgggacagcagcgatttcaacgacgacccctctcgaccacttgagagcgagagccacgtcttttcgatatgagggtagttttagaacctctgaaccggtcagatctaatagacgttgatttgacgacgcccactttatagcgagagccacgtcttttggatcttagggcgtttcgggaccgctctttcaaactcttttgataaaaccaatagaacattacgccagcagattttactagtaccagtccgttccaaatctattgatatgtaccactatttagcttgttcctaaactataggaaaatactagtactagtttcactatggccagaatctgcagatcgatcgagaggaggcagaaatgaggcagtagtaacagagcacgtgatgcaccgtggaagtcgtcccttccgcgcaagcttcgacttcgacatgtgtcgaatcttgaatgtgttgtcaccacacaatcgttcatcacgcattggagcgtcaagaagcccgcgtccagtgttgccggcggcagctcgtccagcgccaccttcacgttggccaccaggtcgtcgagggtgtgggcggccattcgctcttgtcgcgactgtagggcgttgaagacagcaagatccaatacgttcatatcagggctgttaggcggttggaaccgcaagtgtacatcgcacccggaggcgtttactgcctgcctccacgccatgtcgtctggctggatatgcggggaggcgttgtcttgctgcacggtgacacgcctcccgtccgccgcacccggaaactttgcttggatcgatgggagcacgtgctccaccagcatcttgcggtaggtctccttgttgacggccaccggatatggcaccagcgttccagcggggcgattgcggctgcttcgtttcgctggctcgtgtgtcaaaaacgcccagacccccagctttccatcaaataacttgcccgtgatggggtcatggcgcgggcgggctactgctgctagcatcatcacattgggaatatgacgcttgctcttgagtcgatgcacaggcttgggctcgtccggtcgaagcacgaatcgacgcttcaccttgcagagatagaagagtttttcatccacgtggactacatcttccatgtcactgaaatgatgcgttgctgcacttacgtgccccacactaaatgcaatcctcgacttcttgttgtcgtccgacagcatgggcttggcaacggacgtctccacacggagcttcccgatgctcacctgtcggaacagcgtggttggtgggaggaaacaggcttgggcggctgcacggatggtgctccggcgctgcggatcgaccgcgcggaggcgctccagctcgcgggaacggtcgacacgtctgcgcccagtgctgcgcattcttgtgggcgatgcgtacaccccagtgcgttgaaagttgcccagggcccggcgccagatacggctgatggtctgagcgctgaccccgaagatgtctgcagcagcagacagcgcaccacgcggtagggcgccgactgtcgctcggttgaggagggccgacaccacgagggcacgttccgcgtccgaaaggtgcttggtcttggggtgcgaggtcttgttggggtgcgacatcgagtagcttgttgggtttggtaggtgggtgcttggtcggggaggggcgaaatcgttaatggcagtggtggcttcttcatcgatgaaagcatcattggagcttaagcgcttcccctggcgccaatttttcgagctgtgcggagctctgcacaccagtcaaaccgctatgagcaggcggttgcattactaccaatcacacgggcatacaactatttttaaccaattgcgagccaaacgtgctcaaatctccagtagatctggaacggactggtagttcggaccagcgtctcatcattggttgaaaatctatgtcacacaccttcatgttcgcttaagtacgccagaaattctacctccttcttcctcattccagaatctgccggctcgaggaaagatggtgaagctcttctgtgcgatcgttggcgtggcgggcagcgcgttcgaggtggatatcgacgaggtgcatcggcgatcaaggcggagaagccgaacgacttcaaggacatcgatgcagacaagctgcggatcttcctcgcgaagacggcggacggcgcgtggctctcatcgaaggaccctgatgtgatttctgtgcgaagcggaggcattcctgaacaagtgaagacactgctaaacgagcaaatcgatccagcagaagagattgccgatgtctttgcaccagctccgcagaagaagcagatccaagtgctggtggtggttccgggtcatgttcgcgttgacattggtggaactgcttccagagcgctgaaatataagcgtacgtattctggcccctaattgtttgaatatgttgttgctaatttcttgtgtagagcaggattcagacggtggatcatcaacgctcaatgcttcgtacctgccatattggcggtcattacaatcattgttttggcctatggagagaatccaaccgacgaaaaaggatgtttaacagttcctggccgctcgcttatcgtgtgtcagatgattggtgttgatattgcgatgggggcgattctgtcatattcgcaacattggaaatcgaagcttgacaacatgatcgaggaagcgaaggacgagacaccgttaaaagcccagcgacaagaaatgaccgacctgacttttgctgctgaagcccagcatcaagaattgaccgatcacacttcgctgcttcctgctactgacgacaacctcaacaacaacaaccctcacagagcacaaagagaaacagaggaagaggaaagaggaaatgaataattttatggaagcatggtgtcttcaacttctcaattaccaagtatttgttgatcgatcgtgataaatataaagttagtaatatagtaacatggcgtactctcctgagcaataccaagctagcaaggaacgcatcaaagcagcacagaagcgctactaccagcgcacacgcgaagcccgtttatcttatcaaaaagactggttgacaagaatagagatcagattcgagctcgcaagcgtaaacccaaaaccgacttattgatggtgaagtcgaacttaataatgaaaccgaacttaattaattaattaatttttttctcaaaaagtcaatcccaatatagtcaaagacaatggcttaaaacctccaaaaaggtataagccaaatatttgaattaattaatttcagaatattttgtaaatgactaagatataaagtcgatcctgatacaaggtcaaataattataaagtcatatctacggagaataatatagtcaagcatatataggcaacatgtttgcatacgaactcgaaggattaaagtgattaaatattcaacccattcgatggggtagtagctaccgtattaaggtacgtggcaagacggggcgcatggtatacattagcaacatttcccaccccaccaaccaaaaattggtagcgaagcagtaccagatcagtctaggcaagctccaaaagaatgtggctgctgatttcaaggaagacagtaagtaccgcttctaccaaggcaagaacatggagtcgcacctctacgagggaattcagcctgctgagttctacgacaagctcgagaacgtgctcgcaacccagaagtctgccttcaaggtcaacatcgctcttggatacaagcttgtcagcagaactgatgacagcgagactcgctacttccacccgaatattagcaacacgtctgtatttagcactcctgtagctatcaacagcaaggctgatattcgtaagtaggtgatctcggagatttgcttcatggagttggctgacaagctcaactaccccagctccgggtacatggtgaaggggattactggcttcaaaatctatatctaccaacgcgaccatgctctgggtgatagcgaggctgtcattcctaaggcgattcgtgataacaagcacgtcatcaacttccccaagacgaacaacaagtgtgtcttccactgcattgcttatcacaagcaggagggagccaagaaggatcctcgcagaatccaggctctggtgaaacaagccttcaagcagtactgttcgtacaaggagatcacctacactctgggtctgttccgcaatttcaagcctatcgacattctccaattcgatgagcttgaggagtgcttcaagctgaacatcaacgtcttcaacatggatgttgagactggcaaggttgaatgcattcgctgctcggacaaggactatgattcgatcaacatcctgtcgcacgagaatcacgctctctacatcacgaacgttggtatgctccagcagaagtaccaatgctctatgtgtgagatggtgtttgttagctctgataagctacgcaaccacactaagaaccaatgcgaactcgtgaacatcgaatcgttcccagctcagccaaccatctaccaacccgctccgaacagcattcgttccatgctgactaagtactccatcaaggatgctgaccattacatcgatcacttcattgtctatgattttgaggctatcctcaagcctacgggtgtcaaaaacggagtgaatactatcttcacaaacgaacacattcctgtgtctgtttccgtggccgacagcttgactgaggaggtgcgatgctttgtcagcgatgacccgaaggagttgctcaaggatatgttccagtacatcaaggaagttgcggctaagattcagcagtacaatgtctcgaagtacgagtctttgctccgcaaaatcatcaacgtccatggtttgactgacgctgaggttcctggtctagacttgggtaagacgtacaagatggatgatgtcaatgcttggattcagaacggggagtttgcttgtttcttcgatttccacagcaagctcacattcggtaagaagcgctcggattatggcaagctgaagcagtgcattggtcaggtaccagtattcggatccaactctggacgctacgacatcaaccttatcaaggcggacctgtttgcagtcatcggtaatgacaacatcacatcagtcatcaagaaccctagctacatgtgcatcgccacgtcagacatgaaaatgcttgacattagcaactatgttccggcaggcaccagctatgcaaagtacttgtcgacatatctcggtgagtgcaagtgtgatgacaagattcgatgcgtctgtggcctaggaaaaggcatcttcccgtacgagtacattacttcatttgacgtactcagtcagccggaagtccctcctaagtcggcgttcgacagtgctcttcgtagcactagcatcagcgatgaggactatgtgcgggtacagttcgtctgggaacactatggcatgaagtcaatcaaggatctactcatttggtacaacaaccccgatgtagtacccttcatcaaggccatcaaagcccagcgagaactattcaaacgtttcgaacttgatatgttcactgatggtgtgtcgctacctggtctctctgagaaagtcatgtatcagacgtgcttcaacaacctccagcaaccaagtaaggagcctgctgaagcgtttgcctttcccgctagtcgcttaagtggatataagacccaggatgctgatgccgatcgtgaattcaatatgacgctagaacacctcaacgacttgctagagcgtgtgtgggctatgctacaagcaactcacagctgatactgcctcggctgaccgaatcaataacaagctcggacacatcgatggtaatatcttgatcagctgtgtgggatgcaacgttgctcgcaagaacatgtcgctaaagggcttccgccacaagaagctacttgaattcaactcagacaggttggtgtacagtatcgatagagaggagaaggacatctacaccaagatgaaggcgaacattgctggtggtccttctatcatcttcaacagatacgcaaaacgcaacgagaccaagattcgagggggtaagatctgcaaaaagatcatcggctacgatgctaatgctctgtatttgtgggcacttggtaatgagatgccatgtggacggttgagtaccatcgaggcatacacagggatcgtcgatgatattgtaaatgacaagatctttggcttcctcgagtgtgatatccgtacaccagagcacctcaaaccctacttcagtgaaatgaccccaattttcaagaacacccttatcgactgcagcgatcggagtgtcatcggtcagaacatgttcgagtacaacgaggagcgcaagcaaagccgagcaaagccggctcgcaaactcatcgggagctactttggtgagaagatcctcatttttgcaccactactcaaatggtacatttctcatggcatggagatcaccaagacttacagcttcatcaaggctagctctcacaaggcgtttgctccattcatggaagccgtatcgaacgcgcgacgggaaggtgatgccgataagagtaaggccatgattgctgagatgatgaaactagtaggcaactccgcgttcggtcgcagtggcatggacatgagcaagcataaggaggtcaagtatgagtcggatgagaaggcaattaaatcgaagattgagcacttcaccttccatggaatggaagagttgaatgattcatgtgaattcacaatgaagaagagaaagctcaacaacaagaacccaattcatctctcgattgcaatctatcagctcgctaagctccgcatgctcgagttctactacgattgtattgacatctacttcgaccgcttgaattttcagtatcaggagatggacaccgactctggctacatcgctttcagctgtgaaaagccatttgaggagtgcatcaagcctgagcttcgtgagcattttcagcagcacaagtatgagtggttcccacgcgactataatgagactgtagccaagtttgaccgtcgaacccctggtttatttaaggaagagtggtctggtgatgctatggtatcattggcctctaagaactacatttgctacctaccagacgaatcttacaaggtcaaggtttcagcgaagggagtccagcagaatggtggacgaaacggtgatgttctcaacccagatgggttcgaatcagttgttcgcgatcgcatcacgctacagggcaccaacaaggggtttagactcagtaaggagagtaagtcaatcattacgtacacccagactaaaacatctctaaactactattatgacaagcgtcgtgtacttgcggatggtatcaccaccgaaccgctcgacatataagcaactacctggcaggggatttttttgttttataaccatatagagcgatggatcagctgttgtccaaattatactatgaccccaaaacgggctatgtgggtgcccaagccttataccagaaggctaaagaactggagccgaagattacgatgaaaatcgtcaaggaatggtactcaaaccagagcgatattcagcgatttcaggagcagaagaagcgatacgatgggttcaaaatcgcatcgactaaccccaattcatggcagatggacttggcgttttgggagaaaagaccaatcttgactgcgatcaacatcaactctcgcctaggctacgcaaaactactagccaacaaaactggcccgaccgtactagcagcaattagggtttttgtccgcctccataaggttaacattcttacaaccgataatggttcagaattcatgaaccaacaggctcagaaattcttcaaaactaagaaaattgaccatttcaacaatgagccgggagatcacgccaaaatgggtaaaattgaacgcttaaatagaactctgaagcagcgccttgtaaaaatcgaaccaaagcgactaacccagaagctcatagctgctgtcattgagaactacaatagcaccacccatcgatcgattggtatgacccccaacgaagctaaaggtaaggtaattgaatctgaactagtccacaaccaggctgaagccgagaggattgaaaacgagttcgaggtcggcgaaaaggttttgtataggccaaaaaagaaaacatttgataaagaagcagcaagatggtctaaggctgtgtattcggtggtaggtattgatggctaccgcatccaaatcaagtcgaaaaacggacacactctttctttacaaggggccaaacgatctaagaattgttaaagcagaaacatctgaagctactatcaacagaggtgatattttagaggtggagaagatcttagaccacaaaaagatgcgatccggcaagtacaagtatctcgttcagtaggtcggtaatgaacttgactcctgggagccacaagataatcttagattagtcagtaagaacaagagatcaaccttagagaatgagtactggaagtcgataaaaaatgagtcgaactagcttcgaaataagtttaattgagcaatcctctgtaagcgttgactcatctatatctatcaatctattttccaaaaataatgcttaaaaatatatgacttcatacatagaatgtgtcgcaactgcgtagagaatcaacgtgagcttgtacagctccgaagaaagctgtggataattcaagaggttagtcgaatcaaaaatgaactcagagatttagacccagtagccaatttccggaaaaccgtgtgcaatctacagtaccgcgaccagttagaaacgatatttggtgtgccgtttcattgcatcaaggatcgatacatcaatctcctcaatgagcgaaaccgtatctgtcatacgtatcaaccatttaggcatgactccgttatgccaagctattggtgagtatgtatttaatcgatgctaatatttttttatgactaccatgatatagttagacgatgtttcccaactttacatccctcgctcaacgagagcaaaagcggcaggagctactcgaacgagctgagcgccgagttcgtcaagccaagtccaagcgccttatgtacgaaggtgcatcatgggctagcgatatcgcgaatggtatcactactgttccaaagaaatcgactcacgttgatgcttccagtactgctaagcccaaaaccagtgatggttgggtccacgtgagccccgatatgactgatgttggagttgataatagtgcaagaatgacagatgctggtgttggccctgatagtccactgccgcaaaagcccgtcgaagaagatttgttcgacgaaggcaatgctgagatgaaaaatcaaacaaagtcaaaggaagcggtcgctaaaatcttcgaggtttaccccatccttgcagaactaaatattcaccctattgcttccaacggccggcagcttactaagtattatattgggatggatgctaaggtgtacagtattaaactgagaaaatatgtactagttccgagcattgattggtctgagacgtatgaccatattggtgaggtattaattaatgatgtcagattcctcgcatacgtcaataagaaggagcgacgtaatgaaatgggtaaagaggacaaaaatagcccataccaggtttggcaaaatatcggctcaaaaagaaaaagaatcaatgcctcagaaggagattattcaaacctctctaagcagagacttgacgacagttttgtgatcgatactggaacatccacaagatccgatcaaatggacagcaagctcaaattattttggacaattagaaaaaatagggaagtccttgaatctaacggattgataaagaagattgtaccaattcttaatggttccgcaaaatcttctcctattgacgaagatggctatgttttggatcaatggcaatagcattagcgtttacgggaaagatagcgatcgtgtgaagcaagcaatcactcagaaagtgaactggataatgacattccaatctctcattaatatgactaaagccaggggcctcgagttagaactagttggtagcaatgaaaccaaacacataaatgattttaccccagctaatggtgaagctcagcatgggttaatgagtggtattgatgaagacatggacccaagcctatcaaacgctgataacgacgccaagaatatcttaactgattactacagccagttgcacgctaatagtattgatattccatttcggctacaaccaatcgtgaaaatcaacggtgttgttaagtcccatccatcatactactttgggcagccatcggggtctagacccctaaatattttaaatcgtgaaaacaaagcacacaagcaggtgagtggtgtagcttggaaggggctaatgaagaatatcatgtggatggataccttttcgtccctactcaacggggttgaggacttggaccgctatcttaatgaggttgaataccccttcccatcgagcgatgaagaagcagctaagatacttgaagaaaaggagcttgataagaaaagacgtaaaaacctggatgctaatcttgaaatatgaatgaggctattctaaagtctgtacacgatattagacagcaaagcgttgaagagtatgaatacgatgacagcttgcaaaagcttcatgatgagtcaaaagcagcttttcagacatacgatgaggctcagaaacgctatgaagaagcaaaagaggctgttagagggaataactcaaaagcagcgagatcggtgttgaaggccagctatgaaggcgacaaaatcgatatatcaaacgaaggctaagcgatacgccgaggcaagcaaggtatccggcagtggcgttaaacgaaagcttcaaggtcgaggattgcgcggtgcaggtgttgccccgctggaaggtgtagttcgccgaggccgtacctacaatctcaatgagatccaaggattagcaacaccgtcagcctacacatacaagcagatcggaagcaagtatattcgtatccccgaccttgatgctaaaaagctcgtgatcgttcagccgaatcggcgtaaatgtggtcctaagtgggaaatcagtgatagcctccaagccatgatcaaggcacttgtctataagaaccgtatcgatcaatccgcttacgataagctcagcgttgaagataagaaactgttcaaggaggttctatcgattactcatctccaatacagcttccacgataagttagaggatcctctagatacgcttagggctgaatacgataagctaaaaggagagctacaactcggaaatgacaaccccagtatcatcaagcagctcaagtctctgacggtggatatgtacagcaatcgactaattgatgataaagagttcaacgatattatcacccgtttattataaaaccatgttcttcttcaattcgcgcattatctacagttccggaggcagctatggtgacaatagcgacctcaacgtcgctgagctgaaagctatcctgaagaacctcatcattcatgatcgtccccagaagacccaagtcgctgtgtgggctactgacctcgacaagtcgaccaagaaggtggaggcatctacccaaacggaaggtggtcgagtctgggcgtaccagccaaaaaatgaaaacagtcaagacgtttgcacttaagcaatcccatttctaacaagcttgtttcgatatcctcgataaacactgatttttttgtcgctgatgctgacctcgaggatggctgactctccgtcaggacgctttgtagggaggaacacagagtcgccaagaacaacgattttgtcagcctgtagaaggctagatccaacgatctgatttggttcatcattagagagattcgttcgcaaatctttgcttggtccgcagcccatgattctatatttactcagacataatcgctctcaactcatttttgcttctatggcatccagcctatccagtaccatccagcctatccagtaccccttgcaagcacttgtgaagcaggcatacgatctttgggtaatcgagcgtgagttgtgcaccatcgatatctccctcctgctcagctttaagagattcattttcgataaatgaaatgcactctacgctatatttagaaacatcctgggcaatgtatccaagctctcttttatcgggcgttgaccgatacgaaaatagtttcggatcaacatttcttgcaaaatcagcggtatcgactattggtcttcaaacgccgatctgacgtagtgatgtagctcccggcagatactagcatcgagttagcagatttgatgcttacaactatgctagccagtggaccgatagtaaatgttgtttgtgatttggtcagagcgccatatcctagaccagcagcatcaatcgtttgtgaaacagaaccatttacttccatatacccgccaggcgaggtagtctctactccaagtcggccattggaaagcaaagtcatatatgttgtgttattggtgccaaaccgtagatcatttgcagataaatttccaatccatgtagagttcgtagacgtacttttagtaccattatgtacttcgatctgaaattgcaggggcgtagcattagaactttggaataagcagcaaagagtatagttgccatctaaataattggtcccatcgccggtaatcctgaggtattccgttgatgctaacttgaagatccgatgccaagctccgttagagctcctatagtggttattacgggctgattagcatatccgagaaagccgttgatctttttcgaagaatcgatcgtgagatctccattactgatcgaaacattacccgattcgttgatacggataatctcagtgagcgaccctgctgtcgttgtggttaaacgatggttaatcgataaatatcctgtaccattgcttccgctacgggtatagataatgctcgaccctcccgtaaccgacgcgatagagttcgtagtgatcccgaaaaccataccaacgctatctccagctactgctgacgatttacgaatcgacagtccgtattgatcgatagcgcttccagctattggattcgttgtattaacgatatcgatagtagataacgaaccaagcgacgtaatatttggctgagccgcggtttgtagcgttccagttattgatgttgctgtgagcgatgagagtgtccctaggctagtgacatttggttgagcggcggttgttagagtgcctgaaattgttcctgcggcaagtgagttaagcccaattagcgttcttgaagctcctgtaaacgatatgtttccggcaattgtaagccctgttaaactacctagagatgtgatattggactgaaccgctgtctgaagagtgccggttagttgactagcgctcagagcattgattccagagacattctttgatccatcaagaactaatgctttgtttaaatcagccgtgcctggagtaataccaactacataggaagggggagctgatactgctactccattgacggatagactactacaactaatcgctccaagaccgctgatgtccccaccacttccagggacaagcgctacgccaggcgatgctacgccttgagaaacaccggtaatgtatgacaagcgatagtcatacttgtttagataaagagtctgagcataatcatacgttagataaccgctggcatccaattggagcaagaatgccggattataaatcggggatgtgaatattggactaggatatgaaaaacctgaactcatctttgtttgatcctatatagtttagacgataatcatgagcggtattccagatttcggagcttcaatccctaaaaaattcaaaagcgcctctatgggtgatattccagcacttgacatcaaagcgctgtttagaatagtggttctgggaccatcgttctcagggaagaataatttatgtatgttcatcctcaagcattctcctcacgtatttgctcatctaacggtcattgctcgcaatcctcaccaggagttatatgactatcttcgtgataagcttgatggcgttatcacattcgccgaccctgactcgcctccgagtgttgaccggatacgtcataccccaattaattccaataagcctgagctcgtcatcatcgatgactacagcaacgataagcttcttcagaagaatttgttctcacattacttcactagagggcgccacttcgagctatcaaccatcttcttgagccacagctacttcgcaacggacaagatgatcagattgaactcagagtacgtagcgatcctgaaagctaactctaagcgagacctccagatggttgtgaaagattttaatatcaagggagtagatgagcgttcaatcgtcaattattacaacaaagccacggagcgaaagggccaaatgctcttcattgattccgtcaagggtcagatcaggtataacttcgatagaccgattcgtatcgaggactaattccaatttatcaaacaaaactatgcctacaaacatataatcaatatgtccagctttatcaaactcgacagcaccaatctggtacaagatggaaccaattcaacctagaaatactcctttcccggatcggcggctgactttcgtgatgtagtttgcgccattcaatcgatttcgatgtataatagcgaatataacattgattcaatgcagtttcagaacacaacgttcaaaatcgaagtacctaccgctgcaactacatcgataatcagtgtatcccttcctgatggaatctattcgtatgatgatatcaatcgaagcattcagactgctcttgtcaatgctggagcgtatgtaattgatccgtcggggaataacgtattttatatcaaaatgagtgctaacagtgtctattatgcttgtcagcttgatttctctcctacgcctacaactctaccaaccgcaggaggtacatggaccagacctacatctggtttatactccactggcggtacagggttgccgactaccactcgtgttcctcgcttgatcatcgataatgctgaattcgggaaagtagttggcttcacagcaggcacatacccctcctcaccagctactgttgcaagtgctcagtcatcgaacatcatccctcagattcatccaaccagttcctacatcgttcgttgcgatctgatcaaaaacgaatacgtggcttccggtgatattgtcagtgctttcgatcgaggcgacgctgctattggaaaggtcatctcatacaaacatcccagtatgcttggatgaattgccataatggttctcgagccagtattacactcagtatctataaccaaaacgataaaaaagtaatcttcagagatacttcagtatccattatgcttcttattcgtccaaaaaaataactcatctatgctattttttatggcgtctacaacgtaaatgaaccgccagtcttaccattcttacgcatagctcgcagttttgccattcgttctttcatctccggcgaccccttcgctggacgtttctttgctacgcctacaccataacggcgacgaacctcctttcgcacagatctgattagatcctcatgttccggcttggtagcttttgatagaaggaactcctctccagcatcgaccgcatccgtaatgattcccctacgtttcgcgtatccaagcgcattcttagcagccttctttacgtcagccatggatacacgtcctccttccttgtcgctatcggaatcgtaaataccgataccggttagggacttgattgcagctctggctggaacagcagccgttggctgtccagcatatgttgctaaagcaggaacagccgcatcaacggctttggatagaagacctgaattcttagcaaatttgtatgcagacttgatacctccccacaccttggaccagatagaaccaccttgagccttcttgtagcccttcttcacttcgtgcttggtaatgtcaagtcttacgccgcgcccagccttacgagccttgagcgccttttcaaacgaagcagggtggagatggataaccgagccactaccctttagttcgcgtgaggttaggctgagcttaccagtcttgaaagctttggtaagctttctcgcgggaatatcactggagattgttaattcacgatacatgattactatatacgttgaattaaatgtattccagagttgtcaaatttagatctttcattgttttgaatacatctggattacggtattgcttcgaatatagccataggacacagaatggtccacaagagtctccataggttccttggtattgcttggtgttgtatcgatcgataccatacttcttcggtggtccttcccccatactatcgaagaattcaccattatgagccgccgtccagtgtcctacctcaagattaggagggcgaagtagaatcagaaatgacccattcttggggagaggggactttatctcatttgattcgaatatattatcgagttgaacgttcattttctcagcgagttcgatgagatcatgatctgaggtgattggcttgatgaggtgcgacataatatttaattttaccaagctatattaggatccatatagattcaacgatgagcgaaactcaactatccgatctgtacttgtaccagagctcgcttaagagcgacctggagatcaaggtatcttcgagcaagcgtgtaccgcacgttattgacctaaaccagggttcgtaccagaatggtgtcatcactatcgatgctacggctcagcttaacggttccgagggcttcgcaagcctccgtgatgcctacattatgcttccctacaaggtctcaatgaagaatggtggcactgctcaaactgccgctgccaatcgtctatgtctactctaaaatgcggaaattggaacgttattgatagtctgagtctggaactcaacggaaagactatcgtctctatggctgactacaagctcttttggaacaacgttcgtgcccagactggctacagccctcagtacgttgaaaagcacggagctgaatcgttcttgtaccctgacgctgctcagtcggtatcatacagttctggatccgcatctaccagtggtgatggatattcaaacaccatggcattctcgtcttcctttgctgtctcggctcctcctggtggtgcaactattcctaatgatggtttcgttaagcgccttctatcgaatcctcctacggctggcgctgacttctccagctcgtggccgtcggtaggtggtgctgctgcatcgactaccatttctaaccagacctcgcgtggagctttcgtagctggtggtactgctgctaacgcaatcatgggaacgtggaactacatgcttaagattaagctcaccgatctgcatcctatcttccgtgagcttgacttgatggctaaccctcaaattcgcctgcgtttccgtgtgaatcagggaacgtctgtagtcgcggtagatgcttcaaagggtatgtcactaacctctactactctatcgtctggtaatagttgtccggtcatgattgccgcttctgctaccggtaatccgatgaatggtgtgcttgccgcatctgctggctttagtgttgcttagggagcggttgtaaatgctcttgaacctaccatcgatggtacatacatgccttttactactgctcgtttgtatgtccctttcgttcatcttgagaaccctcaagctattatctctaagccggttaagaaggtacgctacaatgattgctacgcacagtggttttaccagcgtgctagtattggtaagtcctcgactcaactaaatgctgctttcgatctacagctatcgtcaagtgttaaaaacgcgaaatatgttgtgcttttaccattcgcggaacagacaaacaactttgcttctgctactgttcagcggttccagagccccttcgatagctctccatacacgcttcagcccgggtcgtcgattcgcaactttaacgttcgtattggctcgactcaggtgttcaatatcagtcatgactatgatttccaccactttaccaacgaaattgctaagatttcagcgattaacggagatctaatccctgagctcgtaaatggtctacttgactatcagacgtggtcgctcacaaaccgcatgcttattgccgatgtcagtcgcctgactgagcgcgatgtacctcaggctattcagatccaaggtacgaacgccggatgccaaggtgtgaatatgctgatcctcgtaattagcgaacaggaactaacgttcgatagactaaccggagaggttctagacttcactacagcgtaagtaaaaaaaagatatatttttagttcagttccttgagtagctttggacacttgtcaatcacgaattgacttttacttagccaatcgagatagcctggatccaatttactgatctgctgtaaagatttgcctcgatacttaccccacgtcatcatataggagttatcgttatttaggaatcttgagtaaagaaagatttcatttcctcgctaatgttgagactgggttggttgtgaatccaacgacagtatccaggatcattcttgaatacatcctcaatggattgacctttgtattttccgaaagatagttcgatcgtcatgttctatgtgtgggtatctatatacatagcctcttaatttttttgagaaaaatattaattctgaaaatgacgtcgtaatgtgccagtaattattgggagtggtcgcgcgtctggtcactggctaacggacgcctcctcgagctctgaggtggttgagaggtcgtgtaggtaaacggacgactatccacaaagatcgttctagcaccgttctcggaggtaaattacggtaagaaattatgaaaataaaaaaactggtgccgcgacccactactcatccggaagttgttgcccttttaaccggtataccggtacccacacttcaactttgtgtgccgcttgtgtgtcgatcgccctcccaaaaagtacgaattgacctttggaccacacattcctatcggcattgtagcctcccttcgataagctaagcggtcggaataatgtggagtctcaaggcgctggagcgggccctgcccgtcgctcgcggcgcgcgcgtggcgttcgccagctcggctgctgctgcctctgtgcccgccttcgagggcgtgcgcctcaacaacctgcgcgacaacgacggcgcgcacaagcgcggcaagcggctgggtcgcggtatcggctcgggcaagggcaagacctcgggccgcggacacaagggacagaaggcgcgctccggcggcggcgccggccgcggccccggcttcgagggcggccagacgccgctgtaccagcgcgtgcccaagcgcggcttcaacaacaagttcgcgacgcccatggagacgctcaacctggacaagctgcagctgttcgtggacatgggccgcctggacgccagcaagaagatcacgatgaaggagctcgtggaatcgggcatcgtcacgtgctcgcgcgtcaagcacggcgtcaagctgctgggcaacggcagccagcacctcacggccaagctggacatcgaggtctcgcaggcatccgagtcggccatcaaggccgtggaggcggtcggcggcagcatcgtgtcggtctaccacaaccgcctagcgctgcgtgcgctgctcaagccgcacaagttcgagacgatcccgcagtcggcgcgtcctaacccgaagaagctcacgtactacaccaactatgagaagcgcggctacctgtcgccggagattcaggtccagaaggcgctggcgagcgccgccgccgacagcaactcgcaatagacgatatgtgggagtagggatggagagaaagaagaggaggagaggagaggcgacgcgacgctgtgtgaatggagtgggtgcgcctgcctctcttttgagccgaattgtctggggtttatcgctgttgcttcttgctgctgcttagactaacatctactgacccttcttctcgctctttcgctgcttcgtgcgctgccaccgcgagtactgcacgacgccgtccatgaaccagaggaatgccacttgaatgacgacgatcaggggcagtgccacggcctccagcacagtgttgtgcatgggcgtgactccgttcgacaggatgcgaagcaggtacacgagcgggtccgtcgtgatgctgaagtggcccttggcaatgccgttgaccagcgtttgcgccgccgcatccggcgagagcggggtgctcaccccctcaatggtcttggtctctggaggcgtcagtgccatctcgtgtttgagcatgggcgtgtcgacgttgccagggtagaaaatgctcacacggatgtcgtagagcttcaactcgttgcgcagcgactcggccagacctcgaagcgcgtacttggaggacgagtactgcgctgtgccaatgcaggccatcagcgagaaggcggaccccaccagcacaatctgccctccttcctgaccacgctcgctttcatgctgctggatcatagctggcagcgcagcgtggacgacgtggagactgccgaagtagttgatgtccatcgagcgcttgaagccggcgacgtcctggtccatgaagtagccaggctccacgattccagcactgcagacgacgtggtccgttgctcgcttgtggaacgcattggcagccttgactgccttcttcaccgcttcagggtcgatcacatcgcaggactgagtaaacactgggacgtctgcgtgcttgcgcacggcctcaatctcttgcttggccgcgtctagctttttggcatcgcgagcaatgatggagacgttggcgccagctcgcgcgtacttcttggcggtggccagtccgatgccggagctgccgccagtgataaacacatgcttgccgtccacgcggaagccaggagcgcgcaccttggtcaccaggaacaactgcccatgcacaagacacaagtgaggtaagactggagcgtgtcggtcgcttcaattcaattccgtacttaccagcaccgagcagcccgccaccgcgtagagcacagtccactcgtccatcgcgttctccgtcgagcgagtccagcaatgcagtgagttatcccacgatgtgcctgccgccccgctcagtgagcggctcacctgggcccaaacgagaaaacgtgattttcacagacgaaaaacgcagaatcacagagcgtgcagcaatttcacagagcaacgtttataacagctgactcgactcccagtgtaacctccagggttacacttttggtagtcactattctggatgtatgacctctcataaagcaatcctgccgacagaattgctatgctggcctgcagtcatcacctaaagctgtggacggcgtcagatccatcagcagaaatagagcactagcactgtcactaccggctgagtgccagcagaaatacacagtgctccttgccacatgcaattctgccagcagaaattcatagtggtttttgccaactgcaattctgccggcagaaatacatcgcgggccttgccacatgcaattctgcaggcagaaatacatcttaaatgcaattctgctagcagaagtacataagggcaataccggcagcagcaaatgcattctgctggcagaaataccggtacttgcgaactgtacgagcaaggacccagccgaatctgctgggtgctgtgtgtgttttctctcctatgtgatattatgccgtgatcgagtagatagatggtattttgtgatgtgcgcttgctgcatggatacctgccgcctcgttgcactaaaactgtgctcctcgcgaccagacaatgctacgagcagaagtttcatgctacactgcaagataaaagctgtcgatcatgatcgtgctacagccttaaagaggcagaggaggctgtagtttatgcacggaggtgtaggaagtattttataatatataatagcgcatcctactccctgcgtcgtagcctacaggaaacctcgtcgatggcgccaaagtgctgaacgtggtctccaccggacgcaacgccagtcggtctgccgcatgagtcaccactatttgatcctatatcgacctgccataagagcggcaaacgcatggggactcgactgtttcattacccaacacccagctttgggttgctcagaccttcgcagaacgcgagcatctcctcgaccaccatgttctcgccaggccgacgcgcccgatacggcgcgtggagatggcgccacggtggacacgaaggagaaacgctgcccgggcgccttggcgcagcccacggtattggggtgcgcggttgaccttgttgacctcggccttgggttctggaattttcagggctcggaccctacgggataaataggaagttgcatttatcccaagaaaaccccacgccataaattaccatataaattacttacggatgcgggttgcgcgaagatggacgcgtcgccgacagggtcaacattcacgtgggtgattcataacggcaagaggtatacgatataacgggttttacaaacttctctgcatcgataactgcgtattgtgtagtcttatctataaaatgtccggacaatcagaccctttaaattacgaagcctgtgttttttaacaaaaaactttatttatgaagtttgagaaatgggtgacccgtacagcagatgtagcattcaagcaaagagagcgtttgctatagtccaatatattcaaacagcgcggaaagtggtatcaccggtagactctgaaataaatttcagagaacatctcttagccaatcaaaaaatgtttacatgctgaacttcacataaatttcaagaaaattgtaagtactcaacgttctatacggtttggttgaggtatacaaattggcgtaggtacaatagctttgtgtactgagcacattttattatatttgagaggaggcattcaattcgggaagggtacgctatttggcggtatccgtagcaacgctccgggctgctactcgaggcatggcaaccgcagcctgtgctactgcacgctgtagcagctagctggtatttcacttcactctatgccattctagatttatgcgggtgatgtacacgtagccctgtttcatccgcttcgcgttaccgacccccgtgacgatcgcgtagctgcacgacgcccccccctgcttaaatacctcgcttttcagtcgagctacatgcgttaatagcgcgcctagttcgaaagtaggaggcagcgggggtggactgtagtgatccctcatgggcgccacaccacaagaagcccccattgtacgcaggcattgagccggccagtagcagcaataatatgcaatagtaaatgtgcgcaattctgccgcagaattgccgcgggttacgctgtgccgaaggctacacgtacaggagcgtgctctgtgaagcaatcgctgtctctgtgattatgcactaccgtctgtagtttgaccccacgctctgaaatatgaccccacgctctgaaatatgaccccacgctctgtgaaatgaccatcttcctctgtgataagaacgctctctcggcccaattccgaggctgttcgcatccgcgcgcgtccgtccagcgatggcctcttcggtggacagcttaacctggaggatttactcgacactgcgattgcgttgctaccagcggacgcgtacgcgctactccttatcgtcgaccacgatttgtacgaagaggaagacatcgatttctgctgcggacgcgcctacggcgggagtcgggtggctgttgtctcgtcagctcgctatagccctgcgctagacacggttcaaggagtcgaagtggagcacgcttggccggtatcacactgccaggcgtacgttgatacgtgtgtgagaaatgctgacagcggtggaggaccgtcgaggaagaaagcgaaaactgcagtgaggaagggaacaacagtagcgcacttgtcctcagcgatgcaggctgctgtcacagcgtccacgtccgcccccgcatccgctcaatccgatggcgctttgtggctggctcgagtttgccgaacggcgtcacacgagcttggacactgcttcgggatggatcactgcgtctactacgcttgctccatgcaggggtcggctggattaagcgaggacgcgcgacagcctccgtacctctgccctgtagaccttgccaaactgttgcatgctactggcgcagactcgaccgtgcgctacggggcattgctcaagttttgtcagcgcttcgaggaccaagaccgaacgtttgcagccttttccgcctggttgaggtataaactaccggaaggatcgagtgaatgagtttgaagccctcgaacctgtgtggtggatgcagttcgcagtagatcgttgcaggacgcgcgcaaaacacttcaacaacaattattgcttttcatccaatagaagtgccctaataaaacaattaattttcacatgtactcaattgcgacggcgatggcgacgacaaggctgacgaaggcgctggagctggtgcgcaacggcgtgctgatcgtgggctgggcgtccatggtaaaggagaacatctttagcgtcacctacggcatcggcgtgtccatgagccccacgatccccgacggctcgttcgtcgtggtggagcgcctgtcgcggcggtggcgcagctgggaacgcggcgacgtggtgcagctcctctcgcccacgcgatgccatggcgagtctgtcacgaagcggatcctggctctggtaggtggtactgcagtgggctgtaaagggagtggtgaatgcattctgatagagatggtgttgctgcaggagggagacgtagtggagctgcagccgcgcttcgacaagaatcgcaagggcaagatcacagtcccgaagggccacgtgtgggtggaaggagacaaccccacgtgctccgtggactcgcggcattacggcgcggtgcccgttgctttgctggtcggaaggccgctttttattgtaagttttggtagcgagggctggtagattgagagggaagaaccatagctgactggcaggtgctgttgtacgcagtggtgatgcaacaagagcaagcggacagtcgacgatgcagagatatgcaagcctatattgcgggtgtatcgaccgcgtcactagcaggtgcaacgagatatttcagcgctcgatcggcgtcgaagcactgctccatcactgctgcttactatagctcgctcaacttcatacccttgcgccgtcctgcctccgcctatttcctattgatttcctccgaagcctattgcgtcatgagctctcgggtcgctttgttccgcagttggcgcagaagttggcctgctctgacgggtaggtcgcctggcactgcggacaattggccggccgcttcttctcactctccgcagattctccgtcagctgccgcctgctgcgctcgctgcttggcctcgtagacggagtggtagtagtccatgcgctcaagctcctccctcccgtccgccagcagcgcccgtacgcgatccgggtcctgcgtcatcatctcgtcgcgaaacttcatctgcacgtacgcagtcatcatctggcgctgctcccactgcggacagcggcgcgccgagcgcagacactgcgcgtacagctgcagcaccgaccgcttcagcttggtcgtcgtggccgatgacatgcttctcgaaactcgggtaaatttaattgtggcagcatttcaattcgggctataaaaagtagtcgactcatgattggcggaaaatcgatattcagccaatcacagccggccgcacattccggtagtccagacgctgccagagccgcccgtcttgagggaagcagagagagcccaagcaggaaccgacagcagcatgagctcccgcacgctcagccacgccctccgcggcggcctcagcgtcaacgtgcgtcgccaggcgctggccacccgcggcggccacgcgcaccgcccgcccccgccgccgttcgcgcgcatcaaggaggcggccgcgccgctgcacgaggaggcggagctggtctggaacgacggcgtggcccccgagacgctcatcgacttcgacgcgccgcacatccccaagtaccaggcgctgcgacactggctctacggcctgggcgccttcgccacgctcatgggagtcgtgacgctctacaacccggactcgtggcgacaggcggtgcgtccatggaggaggagaggaggatccgtcgagcagatatactaacgcgtgcttgttattgttgcatgcaatgattgcagtcgaagcgcggcaaccacctgcccgacctcaagtgggagctgggcgaggcggacgagcccgcaggagagatggacgagtaagatggagacaggtgctgggaggctggcaggctgctgatggagcgaggcagatgccagtctgctggaagttggaggtcatcgaactcgcgtaacaacagcgcacaaataacacagaatttcacacaagcgcagcgttcgtcttcggtcgagtgcttctaggtagtcgtgggcgagtgcaaggtgcaccgtagcaggttaaacagggaggaagacaccagcacagcagcaaggcgtggatgcggcagttgtgtcgctgcatttatgttggaacggtgcttttgatcgttcttgttgattccttcaaggcgttctaaccgcgttattgctcgctggagggcgccgtgggcttccggttagcaatgatggagtcgatgatgccgaattcctgcgcctcgcgcgggtccatgaacagatcgcgatccatcgcctgctcaatcaccttgaggggtttccccgtgtgggacgcatacaagccgttcaacctgtaagagcaacaaccaccccgtcagagaccatggtcccacaacgtattaactcatatcaactccaacccccttacctcgcacggagcttgatgatctcctcggcctggatagcgatgtcactcgccatgccctgcgctcctcccgacggctggtgaatcatgatctgcagcaaccaacacgcacaggcaggccagtcagcacttcatgatactcacagcctcatagtgccccaacaatggcgatacttacacgagagttgggcagcgccgaccgacagccgggggtgcctcctgcgagcagcagcgagcccatggaggcggcctgccccatgcaaagcgtgttgaccttgggctggatgtactgcatggtgtcgtagatggccaggccggagctgacgatgcccccggggctgttgatgtacatgtacacgtccttctccgggttctccgactcgaggaacagcagctgcgccgtcacgagcgatgccatgtcgtcgttcacgggcccgtgcacgaacacgatgcgctccttcagcaggcgcgagtagatgtcgaacacgcgctctccccgcggcgactgctccagcaccatgggcaccagcgagctcacgatggaggagtggaagccgcggcgcgccccgggtgtctgcagcagcgtcttgctcgaccgagtcagcatcttgtcttgcgtgtcccgcggtctcggtctctgcttcaagtgtggagccggtatctgcgggtcaacaattgcacaaatcttttcgggacaagacgcttattgcgggtcacttcaacttgactccgacgacttgagttgctcccacgaggtcatgagggtgatcgaagcacaacaacagggacattatggcaggtatttgcacagcgagcgtagacattcgtagacaagctcagtggtgcatgttctacctgcaatacatgtatcgcagcgctgttcgatgactggccgcgctcctgcttcaccaatagagaacctgcgagcgatacatgcattgaagaatgacactgccatcgcgcagttcaaatttgtacagaaagcgttgctgtatgataatattccacccggcataccggtagtctacttggccggcaccacctcgtccaatgcttggtacatgaacttggcgaacgcggggtccagcagcgccttctccagcgtcttcatcttgtcctgagtactatcaatctgcgcgcacacaccaccaacatccaacacagtcacacaacgagttagtgccaatgcacgcagccaactaacccccccccctccgttgcagtagtcgcacctgcgtcaacgcctgcatgatggctgggttggccagcatctccttcacgcccgccgacgttttcagcacgctcatctgctcgtccgtgagcttctccgtgccatcctcttcctcctgtttttccactgcagaggctgagccagtggctggcgtcgcagtcggcggctcctggggcttctcgggcgccggcgccggctcgcacggcgtctccttgtgcttcttgcagcacacgaggctgcagtacggcgcgcggcacgtggggcacttgtacttggcctcggccgtctcgcacacggcgcacagctgcgcagccatcgtcactagcagcgaccgaaggcaacaatccgattggtcccaagcattcgtcgcgcggtaaaacgtgtttaactctcgtctagtacagtaaattaggaaaagtgaaacccaagcagaccatacacaacaatgtcgactacatttgttattagcgtccttatacaaataataggtgcacgaaaagctattttccgaataatgaagttttgtcatttagattcgcgatgatagtttttcgcatgtggggagttacagtattcaattccactcggcggttgcataggacgccgagtgctcacttgctatcgcatcgcggcggccacaacagcattcacttcgccctcgccagcgccgaccaagatgcaggagctcaagtgcgtggcgcagacctacgcgtggggaaagtccgggatcgagagctccgtcgcgcagctcaaggtgcgtgcgtgtcataaccccaagaggttgacacgcgcttcagtttgcaatggattcgtgctgattattcgttgcatttgctgttgccattgcctgcaggaggctgcggacgagtcgttcaaggcggatgcgggcacgcagtacgcggagctctggtagggggcaccactcgctcaatgatccatttgacacgcatgcgcaccgtctaacggactttgctgcaaccaacaggatgggaacgcaccccaatggcccttcgcgcgtagtgcgtgaagacgaagagggcgagtcgccgctgctgagcgactggatccgggcgttgcgtgccaacgagacgggagacctgccgtacctgttcaaggtgctgtcagtgcgcaaggcgctgtccattcaggcgcacccggacctcaaggtggcccgcgagctgcacgccaagttcccgcagatctacaaggacccgaaccacaagccggagatgaccatcgcgctcacgcgtttcgaggctctgtgggttaaacgtcctgattgtttggatgtctgacgtgtctctgaccgaggtgctttgacgtttctatctgcaggtgccaattccgcgagatgagcgagattgctgctcacattcagaccgtccccgagctccacgcacttgtagatgctgaaggtatgcaggcttcaatggagtagtggagatgtaaaaggtttctgatacgaattgcattgacactgcagtggcacagcggctggtgactcagcagaacgaagcggccctgcgcgagtttttccgctgcttcgtctacgccgagacggataatgttgtcgagcagctccgcaccttgcgtgcccgattggagggtttgacgagcttgagtgcgcttgagaagcttgtaattcgcctggacaacgagtacccgggtgacatcggctgcttctgtccctacctgctcaactacattacgctggagcccggcgaggccatgttcctggacgccaacgagccccacgcgtacctgtcgggtgactgtgtggagtgcatggcatgttcggacaacgttgttcgagcgggactcacgcctaagtttattgacaaggagacgctgcactccatgctaacataccacacgggcaagccgagcgtgtacaggggcgacatccagggcgatggcgtcgcacggttgtacagctcccccgtgccggaattcgaggtagaagcaattgagctcaagcctcgtcagcgttacgcactgccagcaagagagggcgactcgatcgtgctcgtcatttcaggcaacggctcgaccgtagagccttcagggactgctgacggccggcccatgtccaagggccaagtgtacttcctgccaaagggagagatcctggaagtccaaggcggagaggaaggtatctcagcattccgcgcgtctcctaacgaaagtttggcatcgcgcaacgcttaattgaacctgatgtggcgtactcggagcgtcctggataactgagctacagcagtgatcccacggtacaacggagttttttttacatgttatacatgcaagcagaggttaaaggaagataatcatatcaaccgcgcttgcaggacctccccattttacgcttttacgctgcttgacgcgggtgcaggtcgtctctagtcagcatcaggctctgcgctacgttccgcatgacccattgtacttcagcggggccttcgagcttcggtacccgtgcgaaacggccattgtcatctcccggcggtctgcaaggagtgagtgggggtggagtgcggaagtcatccaagtcggtggcgccttcctcctcttccctgttagcaaatcttgtgcgatcggcttcctgttcatcctcctcgctcacgaactcgtcgtcgtcgtactcgataatttctgcgtcggggtcttcaaagtcatcgctgtactgcgtcccgctttggtcgaagaagtcggacgagtcgtcgctgtaaaagttctcttcagcttcgtattcactcgacgatgtgtcggcggacgggtcgtcgtcatcgctgtccgcgtccagctccaactcacgcatcattgagctttcgctgagcgacggtgcctccgagccagcatcatccagggacaaggtggacagctcgaggacatcttcattctcttgcaagtcggctgtagaagtccctgcggaggggttcggttggcggggctcaggagtgcttagtggtgttttcggtcgcccagcacctcgtagtcgaaaggtatcacgaatactgggagctggaccgctggtgtcctgggcttccttggatccatagtaaatctgcaagctgtcgatgcactcctcgctgtactcactctgaaagttcgggttcatgagctcctcggcctcagcatgaaaacgtgaatcatcgtcatcgtcgtcgtcgtcgtctttgacgctggaacgggtaccaccatctgcacgtgccttgccgttgtgttcacgccgcccccacgctaggggcttgttgtctctcgaagccaagcgaggctttggtcgtatcggtgaggtcatggtgttcgacagttcttcaccgatttcctcgttgtgtagcattcgttcccgattatctactcgaggtgggtgtggcttctcctctgtagcaaccacgaggggttctggcgtggtgcttcgttccggtagccggaagctcaactgcgactcctcaactatgctggcgtcgagcagttcgagctcatttcgaacgtctgcgtcgtcttcatcttcattgaaagacctgatcggcatccactgcattggcgctacgggcgctgcttgagatgaaggtgactgagcagacagtcgcagtttccgcttctcaccggaagatcgacgtgccgacacgttttttgggtgcagtcgtcgcctaccgaccgcagaagcggagccatgttgcggccttcgagccacagggttaatcaccttcaccttgagcgagccgcccgaagccatgagtccctgcatgtggtgacggatgaagggcatcgcaaagatctcctccatactgggcctgccctcagggtccttatccagcagcatacgcagtaagttggagacgtccttgtcgtaatgcggcgggaccggggcgaagtcttgctgcacaatcttcagaatgagcgtgagtatgttcggcgcgtcgaaggcgtggcgcagtgcgagcatctcgtacaacacgcagccgagcgaccacacgtcgctggcgtacgagtacggtttgctctcacagacctcggggctcatgtagtacggggtgcccaccaccgtcttggcctggtccaaggtggagtccagcgtcttggcgatgccgaagtcgccgagcttgaccacgttttctgtggtcaagaagacgttgctggtcttcaagtcgcggtgcagcacgcgctggccgtgcaggtacttgatagccatcgccatctgcacgaaccagtccagtacctggctgatggagaagtatcccctcgggtccgccgggttgctatccgggccgacgatctgctctcggatcttctgctgctccttgatcttgccggccaggtcgccgccatcgcagtaggccatgacaatgtgcagcacgttgtccagctcgaagttctccttgtactcgaccacgttggggtgcttgagcttggccagtagctccacctcgcggaacgactggtccttctccttggccgagagcagctccatcgggatcttcttgaccacgtagcggctctgcatacctgcacgctcccgcaccaggtgcgcggagccgtagctgccgcgcccgatgcacttgagctcctcgaagcggtgcatctgcgagctgagaccgtcgcgagcggctcctcaagatcggccccgggcactcacgagcaaatctttggctcgatgggagacacgaagtcgagtggctgagtgagcgggcgcctgcctgcagagagcgagagcaagagtgagaaaaagagagcgcgcgtgcgccggcctgacgcctctgcagctgtctgcgagccgcgcgcaagacgagaagtgggctgagtgctggccgtttcgaggaaggtcggccggtgtggcacacacggaatccagtcgatggaaacctggcgcttcaagcacttcgagtggattcctctgctctctctgcaggcaggcggaacaagcgacacccggtcccagacgccgtcaatgtggtgcccaaggcagcaagcaaggtaaatcaaaagtaagtggcggcgggtcgaacgtgatgcggcgagtcgttgtcggacgatcgatctcccgtccggccagcacgacgaaggcagatagggtagctgtacatgttccacacggcatctctgtattgatcgcgagctgctgctgctgctttcctgtctctctctcagtttctctgctttgacgatgtcagggaaggtcgatgactgctcggtggccgctcctgttcctgttacggctcgttcagggccgagcgcggctgcagaccttaattaatgcccgccgccgtgtccgtggtcgccgccgttgcgagcagcagcctcctccttctccttctgcgtgatgaccacgttcatgcgcgtcaactgttccagcggaaaaccacagcggtgagtccacgagcctgtaataacagtagcatgcatggcgcgacgcgacgcacctccttcctgtggtgcaggcactcgatgtagtcctcgacctgcttgccgcactggccagagtactctgtgtccttctgctccgcgcggccagcaacaaagttagcgcctcgaacacacacagacaaccaacagaaacatcagcagcaggctgcagtacgtacgctgcactgctccacgtccttccagaactggtagcaccggccctcgcggcccttgaatccgaagcccgacgacatgctgctgtagtggtgttcctcggggggctgtggctccgcagattgggcggctatagcggctcgcaccgtgaaaaccgcgtcaccctgctaaaacgatacccagcagatcatatatttggttttatggtatgtcagaggaattagttgacaccaccataagcaaaaatgctgtcaccagacgcattagttctaagcgaccttttggaccaatcaacgaatttaaatcgcaatttcgaccaatcaatataaggatgattatgcgccgggctcgcctgtctcgctttgattccaggctgcctccaagttgcccctatcgtccgcccgcgcgagcatggcatggcgcggtgcataggcgcacaagtggattcaccgcgcgccaggcaagacttcgatgcagctccgccgccttcctcccgctattctgatagcgctgctgctgctggccaccgacgccgcggccaaggacgcgccctgctcctcgcccgaggagtgctgctcgctctgcggcagcgactcggagcgctgcgcgcgcggcccgtgcagcatgaacatggtcacgcgcaccttcttcagtgtcagcgtgccgacggacgccgtgggcttctgggacgtcgtcttctcctcctacggcatggtgccgtacctcgtgccgatcgcgctcgcgctcgagttcatcctgcaccgccgcagctggacgcggctcttcgccttcctcttcatccccatcgtcgccattatcaacgccgtgatcctcgtcaagagcttgggtgagtgtagcgagtgcgatcgcccctgcggcagctgcgtggccagcaacggcatgccctcgggccacgccaccaacgccatcggcttgtgtctgtggatgatcctcgagacgctgcttggcgtcggcaagccgtggagcgccggtaggaaggcggctacatgcgtcgggctcgtgctgctcttcgtgcccgttccatacagccgcgtgtacctgggcgaccacacggagctacaggtcggcatcggcagcgccgacggcgtcgtgctcggactcgtctactttttcgtgctgcgctacgtggtggggcgacgactgcctggcgccacggagcggatgaagcagggccgcttccggttcctcaacatgaccaacgacttttacctcgtgggcgagccactggcctcgctaatgaccaccgatctgcagcagcagcagcagcagcatgcgtacgcgcgcgccgactcgatggaaggcgcgacggcaatgaagtagttaagacagaagtaaaatttattaatctttgatatttttgcatgcagtagacttgatcccgtagcagctctttcgtaagtcggacgtgttgaagctgctccgtgacgagcgcgcttgctggtcctgggacacactgccacattgctcgaagctgagttggcaccgccttaatcgagtcgactaagtcagcttggccagcctcggctctcggtctaaccatacgagttgcaaaggcctagcagcggacgatcgtccagcgctgcatgacggcaaccacccaccctggcccgccgtctgtcttgctgcccctggctcataatcatcgccgctcgcagcaaatcaaatcgctgcaagggaggctgcggagaccgcctcggcgccaaggcagcgcccagctcgtcggcgggcctactagccaccatgcgcggcgaggcagtggacaaggcgagactgcacgatttgagcagctccgccgccgaactcgagctcgagaactgggagcaagacgccttgaagatcacgccaggaaatggagacatgcgggcgtaatcgataaaaaaaaagaatccaacgcctatccaatgtgcccatttttggagatggacacatattatcgctggaggctcttttctcttaagtataaaaggtcgttttatttacagttagtgagagaagctttgttttcttttaagaaatgacccctctgtcacgacggttgtgcactgttcaccttaatagtagtgcgacctaaaaaaattagtcgtgcacctttgataatcattccaccgatatgaaaaaatgtcaatttcacctgcgtcatacttcggttgcccttacggaagttccggttgcacatattcgcgaatgctaaagtcgacaccttttctgccgaacattcgcaagaaagaaaaatgaagccctcgccagcccagcactccaatacatcaagctaattattgtttctctgagatctctctatccgctacgtgtcttaaaataccactggtcaggcctaatcttcaactatgccgttggcgggcctctgataagcaaatgaggcttttcaatgtgattcctcgggatccatatgaacatgcaagaagactttttggcgactagtagaggtatcccaaaaccgcgcgtgcggtgttattcactcaaacaaaacttttatattgtaaggtttaagataataccattccagcacatgcttttcttttttaatattatattcagagtcttgattttgaccgaagtcttcgttttagcatctctggccgactccttgattatccatagcccccgtcccggtacgaacatcaagggcacctatcaccttaagttagtatcaacacaagctcggatgaaatacctcaacctgctgtacgatgaacaagaaggcaacaccacttcagtattgcgtagacggcaatatactctcaaagacaagaattgcgacgactgattatcgcatatcgcggacacggatctgcggtaggcatccacgttgtcgttgttgaccactgaattgaactatgtcctgctgctggattcgcaggcatcgttgcaccccacttcccactagcgtcaccatatattttttattataatttctagcttttagatggtagacgaaaattgggcatttcgcctttccgtgtccaaatgagtacgcgtaatcaccaccgcgatcaagttgctctgtcttttggcggccactttgtaattgacccacttccgctcctcggaccgtcaccacagcaatggcgccgaccccgctcgcccgatattggccgctggtgctcagcgcagccgctcttctggccgccccagcgctggccagctccgacagcgatgacgacagcgtcgactacgtgcgctgcacgacgttcgcgcagtgctgcgagatgtggggcgaggactcgaagcgctgcgagcgcgggccctgcacgggcacgtggatcatgcgcaagttcttctcgctcagcatgccgctctacagcgtcaccttctgggaggtcgtctacacggtctacagcatggtgccgtacctcgtgctcatcaccatcattgtcgaggcgctgctgcgctcgcgctgctacacgcgcgtgttcgccatcctgctgcccattatcctcacggtgctcaacaccgtcatcctggtcaaggtcctgggcgactgcgacgactgcccacgcccgcgcggctcgtgcctcgtcagcaacgggctgccgtcgggccacgccacgaacgccatcggcctctggatctggatcgtgctcgaggccatcgtgggggtcggtgagcgcgtgcgccggtggtccgtggggcgcaaggccgtcgtcgtcttcttcgcgacgctcgtcctgacgcctgtgccctacagtcgctacttcctgggcgaccatacggcgctgcaggtctcggtcggctcggccgacggcctcgggctgggcgtcgcctacttcttcttcatccggtgggagggcatgcaccgcgccgtcgacgccctcgcgcgcttcgtggcgcgctacgtcaagttcgagatcaaggacgacttctacctgacccctagccagacggcggcagcttccggagacgacgcgaccatcgcggacgacagcagcgagagcgagaacgctggcgccaacggcgcgcacgcagcggagaaggagatccagacgccctatgtgcaggcgtaagtgaacacaatagaccagtagtagataacacaacaacaagaacttccacaagaacaacttctacacaagaactttcaccaagcacatcctatttaaggaccgagggctaaaagtgcccgagagctgcgaccgtgtcgatggtggcgacaggttcaacacgggcagcatgaagacagcgtacagctcgagcgatgacggccatcctgaccgcagcgcggacgggaacgtggagaatctcaagttcgaggagaccgagcgggcagaagctcatgacgacaagcatcggaggccttcggtgttccgcgtgggctcgcgagttgagcgcgagctggatggactttggttcccaggcacgatcaccgacgccgagccgaacagcgactgctatgaagtcgaatacgacgaggatatgaaccgagaaggcgaagtctcggccagtgagttgcggttgctagaccctagtcgaagtagagaggccccagcgaagaaggagctgacggcgcaccagcgagaaatgctgcggaaggactcgctgctgatgcagaccccagactacgacccgaacaaggccccgacggttgtgctgcatcaccaaggagaaaccaacgcaggtacttgtcgcattgctggctttgttggtagatatatggcctttgtgattaacctgcgttcgatctgctgtgtagcggcgggatacatcatcaacgggctcgagaacaacgttgccaccggcaatggactgcgcggtatccggtggttgcgaggcaactcattttgaagatattaggcatgcacgcttccccattaatttagtacgagcgtccggactcgctccaccttgcttctgcttgctagaggagcacgcgctgtcagttagaccgagctccagacgcaacgcgtgctcgtagctctcaaacgcgtcgtcgaggagaaattcctagcatcagaatgaaaagcaaagcaatatgcaattagtccgtatcgctcacttcaaagctccaagcgctttctgcgttacccgtttctctagatccgcagcagttgcagtcaggaattgaatatcccgctggatacgcgcttgcaaggcctgcaccgccatcttccgctcgcggtgctcaaatgcagcgtgcttcatacgtcgctggaattccctagctgtgcgactgtcacttgacgcccgctgcaaagcttctgcatgctcgcgccgacgctggcgatggtttgccgacagcgcggtactggcatccacagtcttgcgaagttttgcctcaatttgtgttgtcgggctctcgatcggtggtgtctgcaaaacaggatgcaaaatcaacgtgagaccttcacacatacacaaatgataacagttatctcatctcacgttttccttgtcgcggacgctggacagctcactcgactgtgactcatgatccgggaaggccgtcgcatccagcgtcgactcctgcagcagtccgccaaatgccgtcgatactgcgcgttccagtagctctcgcgtcagtatccgctgctcactctcatctgcacgctcttcgccaccgtggtctcggttcctattcgaatcgaatccaatcgaataattcgattgaggaatccgagttggttttgcagacgtcgctcttcctgttcggtcgtgtccactcgagccattccctggtctccctcttggccttgcctctggtctcgctactcgtcgcggctgagtcagctttgtagacgaattccatgtgcgcttcgggcggtcgactcctgccgccgcattctcctgctctgcaggcatagctactgcaacaatctcaacgacccgcaatgaacagtcgcccgatctaaagctgccacctgaccaggctctcaattcttcttcctcaatgccaccaccaccacggtcagcgcttttattaccacttctaggtcttctgtactcgtcacctcctcctatggcgtttggcattgctctcctctttttaaatactgcttgacacggctcaaattcgtcgtttaatctgaaggtcgcttccagactgccaaccagccgccggtgaaggcgtttagctgctgcgcggccagctgcatggcttccaagtggccgctgagctgctgcagggacgtcgtcgccgcggtgatggctgcagcgcagttctcgtacgactcgatgcggcgctgcacccctgacaggtactcctcgcggccgcgctcgcgctcctcctgctgcgcggaaggccgtcgctctgcagccatgggcgtgcccgcctcgctgcctgctccgatcgtcgacgtccgcggcgccgctgctccttccgtcggtgactccatgctcgaatatgcgcgggaatatgaaattgagacggactattctctgaatggtccatatggtccaaatatttagtccatttagtgtcgatggatacacgtagatgtgtgaaggcaaggaggaaacaaaagcaggggaatgaatgtaagatgttattggctgtggcgggggcacgtaggtactgacactacagctttgcccgtgtatcctgccgaaacgctactgtactgggatgtcggtcgctcacacgcgcgcttcgctctgcaggaagtactcgttccgcgagatctcctggcagaggttgtacgtccgctccaccccgaaagactgttggcacaagcatcacaagaaaacgtcagtccctgcacttcactgcaatgtgacagggcttgcacccatcgcaccgtgacgccgatctcgaacagcaggaacaagtataggaacacgaagagcgggacgcctgggctgtcctccacgtggacgatcttgtccagcaggtagatcttgatgacgaagtaggtgacttcgcccattgcgatcacgtggcagaccaggctcaggacggtgccgtaatggaactgcgggcataaacaatcttagtatctatctgctgctggacggcagaataattgatttaaagtctagcagagcagcacgtacgtgtcgaactcgagctgcgtcaaggttgaccgggttggtgtcgcgcagcgcccagtagccgtaggccatgacaccgattccgatgagcgagtcccaccagaccttgtaccatgtcaccgtgaagctgatgacgaagatagccagcagcaccagtgacagctgcttgcacgccggcgcgaactcgagcgtgtgcggcgcggtcgccgtgctgcgtgtgctccctcgcttctccaccatcgccgggcaatcgctcaatgggatccgcccgatcggcggggctctcggcgccgcacgaccgctggcacaagatccgccgtcgcccaaaggacgcggacggcgattggctggaaacgagatggctacatacggttgacacgcatccgggttctgaactgccgtcgtcttcgcgaatcgtaatatctccgaggctctcagtaacgcggatctccatgttagcgaagtagtggtagagagcatcgtagacgagcttgatggagctcacgccttcaaacggcacgacatcgtacacctggccgcagtagcagccaccttgctccacaaaccgcgtggagtacgagaacgcactcgtgtcatccacaaagcgccctctctctttcaagtaatactgcgccgcctgcagcttgatcggcttcatctgcaacaaagtcgcccaccgctccttcaggtccgtcccgagacggatgctcgttgcgtgtggagctccaggctcggtaatctatcgtgcaaaatcacaaaccacgcctccaagttggaattgtttttaagaaaatccagcttgcggcggttgcgttggaggcggttgcgttggagcctccaacgcaaccgccgcaagctggattttcttaaaaacaattacacaggccctttggataggaggtatattgtcactagaactaaaggcacagtcgtgaaactttgctacatcacagctagtatttcatagtatgtacataaccgatggagagcgcgacgaagctttcgagcgcttcttggcaggtcgcgcgtcgtcccacgacgtgaactggagcttgggcttggacagcaacttcactgggagattggtatagaatgcagcgaggtacttcaccacctcttttgggtcaggacgaggaattggagctttcttggccgcccccgtagggattttaggttgagtccattcctacatgtgcttgaccctcgttccaactgacgggacgggcaccacatacgccgtcctcctattatccgtgactgggtttctctctggttcttgcagccaagacttgaaactctggtcgtcgtatttcgggcccagtgacaggtcgtcgtccggtagcacgagcggagcagggaatgtcgaggcctcggcggatacgttcccttgcgcattcgatttgggcgctcggccggaagaacgcgtggctgctactagccgctgtggagttcgctgcgtgtagcctgctagctgcgcgtgactcgacggggccaagcaaagctggtcatgctcgcaccgggatgtcatggcaatttgccaattttgccattggcaaactacaacttttgaacggaaaatgtacagcccatgttttcggattggagggggtgaaatgacccgcaaatctatcgtgatgcagagaccaaatcaccatcagtggcgttcgagaagcatgaacaacccgcaaacgtagacccgaagcaaggcttaggtctacagttccctgcctagcgctgggccggccttctaaaggttttaaggacaggtagagccacatttagcagctcgattacccagttcccagggatttgtgttgagatatccatctaggatatctcagcattttcaacacgcaagacatctgaattagggggcaatcgttcattggcctcacgccccaggttgagggtgcggtgagcgccccccccaagaaagtgcttgccggagcttcagacttgggctgatcagttttattccagcgtgtgccgtcagatcatgtgacttgagaggccgagggtagcttctggccctagcacgggatagctctcgtaggtgttgctcagccagcggcccaggagcttgattgcgaggccatcagcctccccagacagcagggcggtggcgccaccgatgcgcaccgagtgagtggcgtactgatgcgggtcaacgccaatactggaggccacagccttgagcctgtcggatacttcacccgcccgtaggtcgacacacagatttggtgccgcgttctgccgcaactccgctcgggctcgtagcacgtggtacagcgcctttgtcggacacagcacgggtcgccagtcgcatgcatggtcctccacgctcctcgaccgacctggtcgttcttcgcgccagccaggccgatcgtgacagcctcggccgcgaggtagtgaacgcgagctccttggcggtcggcaaaatgcgcgtgttcggacttgaggcagtactggtgccgtccggattccacgaccaggtactcggagcgccgtaataggaaaagtaggccagtaaaacggagccccacagaagacgctgacggggttgagagaaatcgaggcgacggtaaagcagtctcagaaatgccggtgtaaggggctgctttttcgtcaggggacccgaaaggcggcgaatcccacgcatgagcatgtcaaaatcgggggcatgctcaacttcgattcccgcgtagcgcttgtggtaccacgtatactcgacagcttcagctgaatagtgccatactggttgcctcggtgtcgcccactccgtgtcgccaacaaaaaatcgcaaacagccccagtttagtgctgttgtcgcgccgatcagaactcagccattccgaccaccgcatgtatgccgagaactgaacccactggcgccaatggcttcggtacgtcactgaggtagtgccggcaagggcccggctgcgcagcattgatcccaaaagtgtaagagattctcgtaagccgctgggactgggacctgttcccaaccacaagacaagttagtccacgtagcgtaaagtgcatgatcattgctccaggctcgtgaacccgcgtccgccatcacgttgtcgactccacgggggcagcccccttagggagtggttgtggtgggtgtcgaagagtcgggtgcgtgccgccaggtgtgcggtcgagcgtgccgtggtggcgtgtcggggctgctggggccctgcgcccgacggtgcaaaaagtttctcgctcgaagctaaacgccagttcctcgctccgcgctccccacgctccagttccggtcttctcgctccaataatggtgtcaaccgctattgtccccggtgctctcgcctttctcgggccggcccacatcccggctcttcccgactttcggtacgtccgggtcacgagtgttcaaggaagcaaggccaaggtggctctcgtcagactcgatggtgacgacgaagcgctggacgaggaagtcgacatcgctgtcctacaacggcgccgtgggggcgatgaggaaggcgagctgtggcccggtacattcgttgggcatcctatcgcgtttatcatgccggacggaccatcattggatgaatggacatttggcgtcgtcgctgggtatcacatggcggggggtcacccctatctgcacgtccgcggtgacggtgtacccgtcaagctcaaactggagcaaccgccgaatgttatcaaggtcgactgggtcaactacgtcctccagacgggtgcggggcagaatgcttcggcagtcaacgcggaggagatggtggtgctgatggatgaggtgagcgcccagtgcggcaagagccgggcggggttgccagccaatgtcgcctagtccctctctgtgccctttgatgctgaggcccccgtccccatcatccggcccgacacgctggccgtgatcacggcgccccgccagcacgtcctggactgcgcgttcaacaagaagggcaaaaagggcacgagtatgttcaacccccccctccacggccaagccagccccgaccaagcgcaaagcctcggcgggcgatgacggacgccccgctacgcgccacaaggttcacgaggcggcgccggacgaagcagaggcagacgcgctgatgactgacctgactgcctctgacacggaggcggatgacgcagccgatgcccgggccgttcgccagcaggtcctcgcgtttgggcagggccccgcggcgcccggcagcaacggagtgggcacgacgacgccagctgcagcggcggtcgccgaggcatccttcagcgcggtggacgaaatccgcggacgtgcatcgacgaccttccgcccaacgacgctggagcagcagatacacaatgctatcggtcacccgaaccaccaaggtaaggatgctcaatgtattctcgaatgtgctcagcaggctcgtgaaacctgctttcgtgctgctcccccaattctccgcggcgcgttcgatttcgggttccacattcgcggtctttcggttatgcactttgtccgcgaatcacacatttcgacaatggagacgagcggggcggtggtcaacatgacggatttctctaggaagaacggtctgcagcccgcggcggccgagccgtcctataccgggctgctcgaggcgctcacgaatttgcgccacttcggacgcaagttttacaacgccgccacggtggacgtgctgaacgccgccatcactttcatcgaggaattcgccgatggtggcgacccggaccgcgagacgaccaagcgccttctgctgtggatcaacatgaagctgggaaagttccgtgggctggtcatctcggtggggctagcggctgccgcccgcatcactgacgagtttacgcttcaagactcactcctctcggagctgctgtacgatctacagaaggccaagttggacaagctgacagcgatgatcgaggcgcagcagcacccgtcgccgaaggtccgctcgaagggcaaggaacaccaaccggcgaagctcacaggaagaatacccaagtcgatggcgcgaggtctgcccaagcaaggttcgcagcaacattgcctcaagcacctgtccatgatggggtgcagcggcaacggcacacccgggcagtgcttcgcgaaagggcgagcccactttcgccctacggccctgtcgagtgaggccaaggaccacaccaagcaacacttcggagatctcgcgccggaattcgccgatctctgaggtgacggggtctcagccagctcttcccttcctgcatcctccagccagccccatgctggccggccgctgacaaacactgccacacgcagttgtccagcggcagaacacaacaaatatatgaagagtttggagttgctaagtgcacattgtcgggctgagattgcgaaggaagttgcggctactgccgctcagtggggcgtggagatgtccagcaccccggcgtagacgctggaagacggactggatgtcaatatggtcgcgtttcattctgacctggcggtcgcctcggcactcccgctacctgatttcgtgcgactgctccggggccagacagagaccgatccccgtccgaataaagatctctacgagctgcccctaccgcgtgacccggcgctgcatgaggctgcgcgtcgctggaacgaggtcgttcgttatcgcgtcgtacccgagtggctaccgtcacgccccgcccgccagccatcccggccgcgcaacctcagctccattgacgagcacctcccgcaagattgggcgcacatccgcaagggccaggccgacggtcgctacctggtcgccgggcgtccctgctcgaccagtggcaggacatcttcctctcccccatcggcgtggtggccaaggatggcaccgacattcgggttatcgacgactactcatttcctgaaggctcgtcaatcaacgactttaccgatcgttcctgtggtggagtccctcagataaaaactagtaaactcccacacgtgtcctgccacgcaactacgggggggggggggggggttacccctgcaagccaaatacccaaagacaacgagaactagtcccgagatctctaggcctcaccttgtgtacccttgtagcaagactcggatctttatctagcgtaattcctagaagacgtgtaatatgaaggggtgaatatggggttccttacactcgcaggcagagacttaggttaactctgtcgcggatgcacttgtacagcgaggtaactcttcccactgtacgacaacttgttgtacaatatgtacgagatctactggagatctcctgccgcagctagtctgcgggtccaaaccaaagtgcgagacgcacaccaataccttactaaaccgtttagagtgtcctactgtcgaacactgagagctgatctcctgagtccagacaatgcaacacactacgctactagaaggttaccggggaggccaaatcaatccagaaccccgagtacacttcgcaagtaggtaggaaacagtacgtaggcgctaaccgcacaacacaaagactaatatgaagaagtaccttgtctcgttgttggaaattctgaactgaactgcctatctaccggcggctcgtctgccggccaaccaaccaaccagtatgctgcacgcctttacctcatgacgtcatctgctgtctccgtgcggtgtcatcgtccttgttacgggcctccccgttctggatctccgtaaatacgccatcgggtttcgtaatcagtcgccggccttctatacgggacgccgagctacggtgtcccataattcaagtggctcactctcgggtcaccatcgggtaacctccgggtccatcgcctcacaatccttcagcccgcattacgacattcccacctcccggttatcaagtacaatccgcccgctgacatcgctcgacgcattgtcgagttgcgacgggagtacccggacattcggattcttctgatgctcgggggcgtcgcgggcgcattccggcacgtgccggccagcgccgatcacgcgcacatgtttgcgtttgtcctgggcgagtacctggtggtggacctcgcatgtggcttcgggtggtgtggatcgcccgcttggtacttcctaccgggaacgctcatcaacggcctctacgaagaatcgccgtgcgcaacaactgcagtgtcacgaccactgacagggctgtattggtgtgacgatcacgcgtgcatcgagccggagggcgaccttcgatgcttcaaggctaacctcgccctacgacgagcgatggctacagttcttgggcccaaagcaatcaacacccgcaagtttacgcaatggagtgagcaaggacgagcgctgggcctgctgtgggacacacgcgccggcacagtcaccatcccggcagaaagatctcgaaggcacagcagcgagtgcaggcactcctcgacggaggcacaacgacaaagaccaacctgctgcagctcctggggtcgctccgccacgtggcgtcgtgctgcccaccggcaagggccttttaccaacgcctacacaccgccgcgaatacatcgcaccgatacgggcggcaccagttgtcggcggacgccttccaagatttgaactggtttcaatacattctgctccgccccagtcgcttcaacggtatcccggtatcccagttcgccgggatggcatcgccgatggtggacgtccacattgtaatgggcctactttggcccactactttagcttacacgtgtgcgcatgtatgtgaggaagcgtagcctagtttaaattagagttaattatactcgggcctccgagtatagattaatctaaataaacgatccaaataatgtttttgggttaaaatgagaactgatatttttgtttatgtttctgacttcctctaaatgtaatattctaagataggaatctgccaacggctggttggcagaattccaatgctaagcatgtcgctcattggctaagagatgctgctctcagccaataggagtcctaagtctctatgggccacccgtcgtggtggtcgtaaatgtatgtagcctttggtgtgtctacaccaaggtcgagaaagtctttcgaacctctaacagacgtcgtctgttagagttacaagtgactgtagccacttgtgcgtgtaaccctgttacatacctggacgcatctgacgaggggctctgtgctctggaaccaactcttcgccaatttttccggattcgtttcactgaagacatcaagcaggagtttcgcgcgacaaccaccgcgaactcaatcaacgcacgcgagctccagagtgctgtgctggccgcactcctatggggaccagtatggtggcaacgatttggatgccgtcctaatcacgttcgattttggattgataatgccactgcagtctcgtggacgcaacgacgggccagtcgtctgccacacgcgcaggtgtacaaccgccttctctcgctcgctgagttccagtactcgttgatttgtaccgcgagtcacgtgcctggagtcgacaacgtgatggcggacgcgggttcacgagcctggagcaatgatcatgcactttacgctacgtggactaacttgtcttgtggttgggaacaggtcccagtcccagcggcttacgagaatctcttacacttttgggatcaatgctgcgcagccgggcactacctcagtgacgtaccgaagccattggcgccagtgggttcagttctcggcatacatgcggtggtcggaatggctgagttctgatcggcgcgacaacagcactaaactggggctgtttgcgattttttgttggcgacacggagtgggcgacaccgaggcaaccagtatggcactattcagctgaagctgtcgagtatacgtggtaccacaagcgctacgcgggaatcgaagttgagcatgcccccgattttgacatgctcatgcgtgggattcgccgcctttcgggtcccctgacgaaaaagcagccccttacaccggcatttctgagactgctttaccgtcgcctcgatttctctcaaccccgtcagcgtcttctgtggggctccgttttactggcctacttttcctattacggcgctccgagtacctggtcgtggaatccggacggcaccagtactgcctcaagtccgaacacgcgcattttgccgaccgccaaggagctcgcgttcactacctcgcggccgaggctgtcacgatcggcctggctggcgcgaagaacgaccaggtcggtcgaggagcgtggaggaccatgcatgcgactggcgacccgtgctgtgtccgacaaaggcgctgtaccacgtgctacgagcccgagcggagttgcggcagaacgcggcaccaaatctgtgtgtcgacctacgggcgggtgaagtatccgacaggctcaaggctgtggcctccagtattggtgtcgacccgcatcagtacgccactcactcggtgcgcatcggtggcgccaccgccctgctgtctgatagaagatgtgacggggcacacagcacttctttacagaggaagcaggagtatacaaactccagtgaacagccgttcacgtgtccctggtctgaaggggacgacttgacttgaaaagcggtagatctaagactgaatgtatttataggttggtacagatttggcctgcatacaaatcctaagttccctatagtttgtgtcatacaaaatgtatctgttggctctgaggccacttaggtcactatccaggggagtgaccgatgtagccatcccggaatagtgacagggtcactattccatgtaaccccgttacatcctcccccacttagattcgatcttatcgaccaatcagagcgagattacgccggcgactcacatttcactcgcaaagtcgaaatccatcgacaacggcgcgaggtctggcgcctcggctcccgggcctcacagagcaattggcgcatcgccgagcaagccgcatctccacgtcgaccgggagctccaaagcgcagtgcgcgcagtgtgaaagcacctccgaaaccgcgggccgtagggccgaagaccagggcggccaaggccaaggacgagtcgtccgcgctgatggaggccacgaaggcggccgaggaggtggtgcgctctcgtagcagcacgccggagagtggccgtcaggccggggctcggagcaagtctcctgacgccgcgcaaggcaaggaggagagtcctcggggccatataagcccggctcgcgactgggaagccgacgtctttgactgcacgatggtccagtactccggtgagagttcacccgacgacgagaacgtctcggagggcagcacgcacgctaccgaaggcacggagctggcggcaagcgacatgaccaacgcctcggccgacgcaaagacctcgtcagagaaggaggcggaggacgccgagtccggctcaggcgacagcaagcagtcgcacgacgaagtcgccatggccgacgctggggtcgtggccgagaagtcgccgagcgacgcgggctccaagcccaaggaagcatctgacgctggcacaaggtcgtgagcgtgcccaagcgtcgaaagcggctgccgctgcgaaggccgccgaggccaaggcgaagaagcgttcagcttccaggtcgcctcgcggctccatctccaagctgtacatcgactcggagtctgaggacgaggagggtgccgtccacgagcccaaggagctctcgaaaaacctcgacgagcagcagcagcagcaataccacgctgctagctcgggtgcgtatgccaggcagccgactgccacgactgccatcgagtcttcttcaggcggggatgccacgtacccgcagggctacttcccacccgagcctggcactggtgcgccagcgttgttggagaagctctcggctcctcgtggccttatcggcgggtacacctcgaggggttcctatgagcgtgctcttgctgagaaagagccactctatcgtggcgacgttgaagtcgcccggtgtgtgctactagcaccacacaagctcatctgaaggagttcaccacgcttcgcaagaagccggaggacaagggtggactccattctgtgtggggtttccactgggtcaagccgaatgacaacatgacctggagcgaggtggaagacctcttctggcgctacgtccagcgcaaagggtattccgaccaagagttcaaagaactccgtgaggatcgccctctgtccgcaatcctggacgtgcgcgagctccgcatcgagttcgctcaactcgtgagcaagcgcaagctccactcgaaaatggacgagctgaagcaagaggcgagagccaaagctcgtgaagagcgtgggcgtggtgcgactacgtctgctaccgtgccccgggtaccggccaagaagccaaggactacttacgaagctgccgctgcttctcgtcccatatcgcaacagccttcgggcagtctgcctggagctgctcaacgggctcccacgagttatccgactcagggtaacccctccacttcacgagcagctggcgcttgccgtggagccgccgctcccggacgactcgttccacgtggtagtggatctgcccattgcgatcaaggagggccggcggcggcctcgcacggccatggctacgagcctgaggcgacgcagccgtatgctggggccccgagtcaggtggtggccctgcagcaagaggagattcgtcttcttcgggaccgtgtgtacgtcctcgagatcgcgcttggcgtcggccttggtggcgaggctgccgctcgtgctggccagcctggagccgtggagcggctccgtgagggtgttgcctcgctctatcaagaaactcgcagtctccatggccgtgtggatcgtcgagccgacctgtcgtcttacgactcgctgcgaaaccagctcgctggccttcgggccgagcttcatggccacgcgccgtatccggagcagcagcagctccactcgtatcaggcccagtttggccagggttcgtacgcggtccctgcgtatgctgctccgatgtacgccgcgccgtcttacgaccagcgcgcgtatcaggcgccttaccgcgacccgacgccgcgcttcgaggagctgcgctcttctccaccgggccacccaccgcttcctgcggggcagccagagccagagggtcatggtacctcttaagacgacccacgtaaaacgtcgggtgagtcgtcatcgacttgggcaagtctatggtgtacgccgcgccatgccggctgaggaccgtgaagggtccaatgaagcggtgtttcagcttgttgctctcgaccgagctaacagtgtttagcggtaggtttctagtatctaggagaactaaatccccaaccttaaacacgttcatgtttcctcttccatttcggtcagagtactccttctgtttatcttgggcttgcgccatggtgtctcgcaccctgctgattatggtcagcctgtcttcggcaaacgagaacagttgcttccgcaaggtggctggactcacgtccgagacttgggaggaaaaggttttccgagccttaggaccgaagccccggtactgcctcgtaatgtgagcggcacctgagggtggcgcaacccgttcaggtaaaagggcgtaaagcccgtcgatgcatgtaccgcattgttgagtgcgaactcaaccatgggcaagcgatcagcctaagagcggggcatctccgcgcagatactgcggagcgtgtcttcgagcacgcgattgacgcgctccgtctggccatccgtctgcgggtggtccgccgtcgacatcgacagtcgtgtgccgagaaggcgaaacagcgtctgccagaacgtagcggtgaaccgcgggtctcgatcagagacaatggtctcgggcagaccgtggtgtcggaagacacagtccatgaacaggcgagcgacctcgtcgccagtgacggtgtcacgaactggagcaaagtggaccatcttgctcagacggcacacgaaggcaacaacaccagtgttgccacggtcatcggccggaagtccgaagacaaagtcgagactcatcgacttccagcagttcgctgggaccggcaggctctgcaatggtgccgaggcgtgaccggcaggcttcacgcgctggcacgtctcgcacgtacggacgtaggtggcgacccacttgtacatgtgacgccaccaaaacatctgcgagacagacgcgtacgtcttctcacggccgagatggccactggatggagcgtcgtgcgcctccatcaggatgttgtacttgagatcctcgtcgttgggcacgacaatacggggaggatcctcgggctcgaccctatagcggagcaaaccgtcagcccactcatagcggtgcagccttgcacgttgtcggggcgtgagccactcggccttggcttccgagccagcggccaagaaccgcacaagaggtccgagactggcatcgtctcggtaccccagcctgatgcgatcatacagatccgtcgtgacccgactaatatgagcaagctcgtagtcgggtcggcgcgacagcgcgtcggcaagcacgttcaacttgcccggcttgtactcgacacggaagttgtattccgcgaagaataacagccaacgcgccatccgctgtgagagatgcggcgtgttgacggcagtccgcaaggacgcgtggtctgtataaacgacaaagggcgtcgagcccaggaggtgcactcggaacttgacaagagcgtacttcatggcaagtagctccttgtcgtggactggatagttccgttcggctgccttgagctgcctggactggaacgagatgacccgttcgcggccttcatcgtcggcctgcaatagcgcacagccaattgcgtagtcagacgcatcacagactacgctgaaaggcttcgtctcgtccggcaatgccaggactggcgcgcgctgtaagctcactttgatgtcgttaaaagcatcttgatggcgacgctcccagcgccagtcgacatccttcttcaggagatccgacaagggccgtgccagctcggcgtagcctgtgcaggtagttggcgaggcccaaccactgtcgtaggtccttctgcgaccgaggtggcggccaagccgcgatggttttcaccttctccgggtccgcccggaccccggcgctgctgacgaagcagcccaggaccttgatctcctcagctgcgaacacacacttgtcaatgttggcgtacagcttgttcgcccgcatgacttcgaacacacgtcgaaggtgctggagatgcacctccatggccgtctggcctgcctcggcacggctgtggacgaagatgtcgtcaaagtacgtctgtgtgaacgcacgcaaaggtcggaacagttgtgtgaccaagcgattgaacgttgccggggcgttagaaagcccctgaggcatgaccagccactcccagagcataccgctcggcgtgctcacagccgtgagtgggatgtcgctctcgcgcatcaggatctggtagtatccgtccaccaggtccagcgcgctatacagcgtgcagccggtcatgttgttgagcaacacgtccttgcgcgggatcggtgtctgcgcaggcactgtcgcgctgttcagcttgttataagcatgaaccagacgccactttccgttcggtttgcgaacacagaaggtaggcgtcgagtgccgggacttcgactcccgcaccatgcctgccttcgccttggcggcaaagaaggcatcaatgacttcacactgctcccggggaagaggccattgcctcgtgacacagtacttcgtgcccggcacgagatcaatcacgtgcctgattcccctgtccggagggagattggacggtggatccttggacaccacgtcctcaaactccttcaccaaggggtacaccgggtctcgggggttcttaagaatctcagagcccatgcgcgacgcgagctgtctctggaactcctccaggactgtctggtccatgaccgaggacgagttcaactcggccgacgtggactccggtcggaggagaaccaactctgcgatctccccggcctttagctcggccaagaagtcctccatggcgagctcctcaaggttcagcaactctgaaacctcgggcagagctgtaagctcgacagctcctgtcttgacccgactaccggtcacgccgtcgaagatgtgataacactcttcggcggctggagccttggctggaggctcggagtcgctagcgactggcgtcgtcggtcacacgactaggcccggcttacgacgtgaccctcgggcgtcttcgtctcgtggtgccgccttgacggcaccaccgattttctcgatctcgtgcggaactacgttacccgccttgtccttgagcggaacttggttacccgccttgctgggtggaactatgttacccacctcgccgtgtggaacttggttacccacaccaggagcgcttccagcgactcccgcatcagttatggtctgagtgacctcagtgacggtctgagtgacctcgcatggaacttggttacccacgccaacgccagcggcgccttctccagcagcccttgctgcctgcggtactttgttacccgcgtgtggacctacgttacccacctggtaggtgctgtccggcacctccactctcaagccttgtccagcccggtcggaatcgttgttagtctcgacggaccccaagaactcattagacgctgctgcgccctggcggccctcgcgggcgccccagctgctgccagaggtgggaacatgactcaccaaagctctgtcagagcgtgggggacggctggccccgatggccttgccgcgccagtcgatccaaggctcgtgtttctccagccatggcatgccaaggatcaagtcgtacttgtccatgtctaggaccaagaacggctcgtgctgtcgaagtccttgaacttgacagtgaggtccatgtggacccgaggtacttctaccaccgtaccgtcggccagtcttaccgagaccagcccgttgcctttgctgcctcgtagccatcggcgtacttgtcgcgattgcgtgcgacagtctggcggcgcgcaaagttcttggacgccccagagtcgatcaagattctcaagggatgatcgtatcctggtacactcgcgtgcaccacaagcagcccaccgctgcccttctccgcttcgagagtacagagactctcaggggttaagtccccatggcgtgcgccacccgcacgcccctcatgaagacttagtgtttccccagtagggtgccccgcccctactgatgtccggcgttcccctggttcctggggcgcggtttctgccagcgacccctagagccaaagggcttcgaagagaacttcttcttcagtcctcccgcgggacaagcacgtttcatgtgcccaagcttgccacagccgtagcagcgagtgtcgctctgctcggccatgcccagaaccatgggaaccggcccgttgatcgctccattgccggagttaccattaggcgcaccgccagaggcagggttgctctgccataccgtggcgggggtacgagcctgcttgtggctgtactcctcctggagggcgatctgaatcgcctcctccatagtgtttgcttgcacacggaacagttgcgtgcgggcaggaccgacacgcagaccgtccatgaacacggtcaccttgatgtgttcaggcagggggttccccaccaaagaggcagtgagcactcgcacctcctggatgtactcatgcagctcgcgccttccttgtttgcaggcgaggaagcgcgaacgctggcggtactcgtagttcgccggaagaaacgcggcccgcagctgctcgcacagctgcgaccatgatgcgaagcatccaggcgtcgtcgctttgcgcgtatacgcccaactcttagcgcgaccactaaggttggagagcgcaaaggcgacacggagtcgctcgcccgagacgagagccgtgtccatcgcgagctcaacctctcgaacccagaagtgaaggttttctccttccttcccttcgaaggggtgaaccttcagccgcaggggcttcggttgcaccggcttcggcgcggccgcagtggcctgcagcccttgaacgtgggcgatgagccctcgctcgtaggtgtcgaacgcgttgatacgctcaatctgttcagccggcgtcgccgccgctaagctacgcagggcatcagtcccaacgatgcctgccatcttacgaacggactcgtactgcgagtcgttcagatggggaaactccgtacgatccatcttggctcactcgatgagaccacagacgattcaggtagtccaatctacccgtgtaggcgtaggattgactacaagtgctaccaagtgtgacggggcacacagcacttcttaacagaggaagcaggagtatacaaactccagtgaacagccgttcacgtgtccctggtctgaaggggacgacttgacttgaaaagcggtagatctaagactgaatgtatttataggttggtacagatttggcctgcatacaaatcctaagttccctatagtttgtgtcatacaaaatgtatctgttggctctgagaccacttgggtcactatccaggggagtgaccgatgtagccatcccggaatagtgacagggtcactattccatgtaaccccgttacagaagaagacacgagatcgagcgacagataggccgaagtagactaggcatagttcgactcgcgcgagcggcctacgagactcgtgggcttctcattcgcaaagtttctcgctcgaagctaacccgcctcaccgcaccctcaacctggggcgtgaggccaatgaacgattgccccctaattcagatgtcttgcgtgttgaaaacaatatatttgggtgccatgatacccgtcctgaacaccgaaacatggatgtccatgatttcagcatgttttacatatttggagatcttacttggttttagtatgcctttatccctaaccctattccgaaacatgggctgtagggccagccacttttgatctgcatgggaattgtctgtgacgtgtgaaaaactttgagctcgaaaggaaacgaatgcgtgcaaaccttgtactacatgaagtcccctatctagtggtcctagcagaagttgggactgtgtagtacttcaaacgtaaagtgtcgggcactagtgaccagtgttgtcagcgagcggcgcaaactcgtggttgaccgacgtcgtggacgttggttcgacggcttcccccttttcgatgtccgcgtgcacgggctccaccttgagcgtgtccttcttcgtgacagtcaagaagaccaccaacactgcgatgagacccaagaagatcatgctcgtgaccgtcgtgccaaggttgaggcctgccttccaccccgaggggaggccctctgtagcagcagcagagccagacatcgacatcgacattgacgccgaagtcgacgctgaagaagatgacgatctggagctggagcttgagcccgagtccacggagtcggccgggttttgcgacatcaagtctccgagcgaagcccccagcggccgagtgagcacgtacacggcccagaagccaagaactccgttgaccaccttgaaccaccagagcagtccaaccaagacgatgcagccagcaaagagcacgagcgagttgccgtagcctacgtcaagctgctccgcgatgagatctccagctgaagtgcccagtgcgaacgtcaccagcaccgccagccagtaccaagcttcgcgccgtcgagtgaaaatgctgtggatcgacaagttcttctcaacgtggtaccacgaaacgaagacgatcaccaacagcgccaagaagatgggggtcgtcaccgccagcgggacgttgaggttgtccgtgaggttatcactgagcaacgtgccgacggtactgatcgcaacgatgacaaaccagtagagcggcgtgaagtagaagtcgagcttcatctgcgctgcgagcgaggccaacaggatgacgagcatgacgccggaggttccgcctaggccaaggccgacattgtcgttgagaaagtcggcgaaagtctctccgacggtggtggccagcaccttgatgatccagaagtagatggttacttgcggcaccttgacgcccacttgctcgtcgaagaagcccatactggagcttgtcggttggggtgaagtgatgttatctgcttgttgcccggagcgcgcaaatgtaaatgtgttggagagcacgccttctgagcagcacaatcaagttgttgtagtacccagaacatggagattatttggaaaagctatcagcacttgaaacgggttcgcgttggggttgttggcacgtttgagacgggcagcacagcctggaagtcgccatggtcagaccaaatggtctgtccggtggtaagtttgcagttgtaacgtgtggcaagtttaccagatttttgaggcgggcgcggtaaacgactgaacgctggacacgttatcccatgcggcaaggttatctggttcagacgcagcaaaatgtagaagttgtaaaagttatgaaaccaggataccttggcgtaatgtgcttattttttacatccatagaagctgtgcaagcatcagtacagacttgacaacgatagcaacagtttgaaatcttggtcgggatctcgatctgaccgcacaactgcagtagcatctgctgccgttgttgcacatttgtggctacaggtcgatgtttactctgcttaatcgcatgcgactgtcatacaaatgctgctcacttgccagagtccaacaccgccacgccaaggaaaaacaacccagcacgcgtatgctgcagctccgagcgacctccatgtccagtcggctctcacgatcgcagtccgttcgtccagacagacagcggttgtgccaaacactcaaaatcaaaaggcttcagccctgcaatggacgcgaagaagctgttgtgcgtatcggtatctgtagaatgcggcacgggggggctgagcaatacaaggggttagccatagagttggggggaggattcttcccacttgcgtctacagcacgctgcaacccaccaagcgactattacccaggcaactaatccctttaaaaaagtactacctatctctcacggaaccgctgcgttggggtctccttcttcatccacttcaactggttgaggggccagatctgtcaccacagcacagtacagcacagcaaacacttagtcccaagtcccccttggcctctagttggcaacatggcagctcaccctcatgacgacgcgtccctgcagcatcgagtacggcaccggtccgtagtaccgcgagtcgtgcgagtcgtgcttgttgtcgccctcgagccagacgtggcccctcgggatcttgtggaactcgacgtcggacggcgagtagcgcggcttgacgcagaccgtgtccccctcctgggccacgatgcgcttgcacacggtctgccgcgggttggacacggacgtggcgatgaccacctcgcccggctgcagcttccagagcctcggcgtgagcttgtccagcagcacgatgtccccgtcgcggttgagcgtcggcagcatggacgggcccacgcacttgatggtgtcagccgcctgcatgaggcagaaggccgcacccccgaagcgcgcgaagcacgcgagcaccacgcccacctcccgcagcgccgccttggtccccatgatgggctctgccaataaagccaagtgcggtcgcaatagcgtgaagcgatctcattggacgaaaatggcggcaccctgaagcggtgcgaaagccgttgcagttttggccctggccaaggtgagaccaatactcgtagtggagtgagagtgagaaggggggcgggcaggagcttagttagttagtgctgttgctgtggtcgacaagagcgatggattcggacggaccgtcaggtgtggacgtgctggacggtacgtggacatttatgggtgcaagttgaagtgtagatggaccctttttgaccacatgttgccccctacagacctgctgcacgatgtggacggcgagggcgacacgttcgaaggtttagagccttggtcctgtactgaaaatgggcttggacgtgctgaatgaattgggttgttgctgttgcagacgcggaggctttcttcgatgcggacccggaccaggacggggaaggtgcgaggcgctgtgctgcgggttgttgtcttcgtggttgtttgttgacgtggattcgcgttgctaggcccgggggagatgactacagacaacatcttgagccagttggacgcagtgacgaaccttgatggttgggctcagctgtgctttgggattccagagtaaaagtactgacgcctttgctccttttactttcttgttaatacgaagacgacgacgcgctcggtgacaacgcagacgagttccacgactccgagtcggtgccttcttctccacagctgccgggtgctggtgcgttgtgcttggtttgctgaacctgctttcgtttgtgtagtctgacggcgatatgtatgaattgtgtgaactttagacgagcgtaaaatggaggaagacgctgtcgatgaggatagcgcatcgactccccctgaagccactctaccggagcaaacctcaccaattgctagcgaagacgtggttcaagccgttctcgatcttgcaacagacgcacaagacgaggtcgccaatgaaaaaggagacgaggacgaagagcagcaggtgaaggatacaaacgcgcatgaaacagcgctcccgactcaagagcagcagcaaaccagtgcccaggatgaagagggtcaagagatatcgagccattcagctgagggtgagcttttgacaaacctcgcactccagggcaacgaaggcgaagaggttgtcatggtaaccgagatacttgatgctgcgatcgccagtccgacaacagacgaaccctcagaggaaagcgcaggtgatgaggaggattctatcaacaaggcagccgcagtgaccgacatacttgatgctgtggttgcttctccaacctcgggtgaatcggaactacgtgcgaatgaagacgcagacgcagaagaagaggaggacgcactaccgactccaccagctcacgagactaccgacgatgatgcggaggcggctttatcccctccggttgtgcctccaccagctcacgagactaccgatgatgatgcggaggcggcttcatcccctccggttgtgcctccaccagcacctgcagccgtccctgtcatcgttggctctatgaatcccgtggaagaccacaatgatgattcagacggctcccagggcgaagatgacgatgagagcacacctgcgccacctccgttgcagttgaacgacccagacgacgatgacgaggatgtgctggaggtcgatgcggcagtggtgagtacgctggaaatcgagcagaagcagcggatggagaaacgcgctgagacggaccagcaagtgtcaaaaccaagagaccaacctgctactgctgataaggaagacaacgcccttttgaaggcacttcccagcgttaacgccagcgatacgagcgcgattgacctttctttcggggaggaagttcgggttgcacacgtcacgacgctggagcctagtagccccttctcggacatccacaaaatggccggcggggccaacgcgactaagctcagcgctgacgctacgtttggtatctcgtaccagagcatgcgcaagaaagctgacgagcctcacgctgccgaggacgatggtggatactcgctgcctagcggcccggcgttccccgacgagcgcgagttcgagaacgagatggagctgacgagcgacttgtcgttctcagtggcaactgccggcagcgccagtcctagcaaggcggaggaggacgagttcgcgtttgacatcaagcccgctgcagagttgaatctgttgtcggaagacgagctcagagctcggagagagtcgctggaggctcagaagcggagggaagaggaagaactgctaaaggagctcaaacgggccacggacgaggagaagaagctcattgagagcaacaaagcggcggagacagctcaggctgaacccgtagctgtcggagcgactgacgctgccgttgagcctgacgttctttcgttgacggagttgcacagcatctataagcgaggtcttggggaccaggaggtcctgatggatgagaacgagagcgctgatgcaacgaaaacgactgagagccccgaaattggtcggtcgatgtccgtaatggggcgcatcttcagtcaaacacaaggagccaccgagactatagcagaggaagccgacggtgacgaagatagtgaagagaacgtcgaagatcacggaggctccgacattgctaacgctgtcggtgacaacgccgaagatacgaagacaatcaccgagaagagcgacgtcgacgaagcgtccgagtggcgggagatcaaactggtgcagcatcgacaaacccaagaggactcaggatcgggttcgcctgcaaagaccaacaatggttcagagacagcgtcagtgtctcggataacttatgcggaagcagcgggctactacgcggagacacccgacgtcatgcagcaccgagacatcattgtatccgaggacttcccccgtggctcatgcttgacttgcttgtcacgccctcgactcacgttcgctggagcgattgaagagcgcgatcgcgtgttctgcatcgctgccaccgccttcgacgctcacaacgaggtggtggtgaagatgctgcagacgatctacaggaagatcacgaaaagcccgcgcgacgtgcttctcatcggcagacactgggaagatgtcggtttccagggcacggacccctccacggacctgcgtggctgcggcgtgctctcgctgctccaactcctgtacttggtggacgcctacccagacctggcgcatcgcttccacgggctctcgcagcacccgacacgccacttcccgttcgcctgtgtgctcatcaacatcacgctgcagtgcgtcgtggctctacgtagtggggtcctctacgctgagtgcaacaagcatgcgagcgtgctgtctggcatgaaccgggtaagtcgctggctcgtcactattgttttgaagaaatattgatcgcccactgacatctgccctctagctgtacgtcgctctgacctccaacctccacgacgcgatccagtctcgatcggatgagatccctctcatcatgaaggacgtgctggatcgtggccgaaccaacccagcaaaagtgatcgacgaggccttcgatggaccaacgctgcgtcccactcgaccagctgccgccgctacttcttcaaaggcgaaaggagccgaccgcaaggatctggagttcactgagatcggactgcactctgtcgacgaggagtgaatgaactgatactccctccccctccacctgtacaacaagaaacacacaaaccaaaccaattcaattcgaagagaagatccgacttacagaacgatttcaatacaaattgaggaatgaagtcgcggttttcgttcttgcacagacttgcattacgataaatagggttcgtctctagactcctgtacaaggtgccgaatcttgagcactcttgttgatgatcccgtgtgtgacagggataaggaagatgcggcgttgagcgaggggaggttgggtcgacgtgctgatgctggggattcacctcgtgatggaggggccgacggcggaggatccatagggggtaccggcatgaacctgtgctcaacataatcctttcaattaaacagctgaccagagctcgtaaaagtactttgtaagcgaacgtacattcgacttcgaacaaatgagctgggtttgttcgctttgctcagtatgctctccaccttcccagccgcctcctaagctccaaatacagcaaaaaggcgtcaaaccacatgctaaccgcgttaggaaaagtgagaggcgtctgtacctggtcctccagcgttttctccagcgttttacgaagatcgtgcagatcgctcagcgacgggggaggcttcactgctgccactttccggcgatcgtcatcgatcaagtccttctccatttccaagcacccctgtagttttgagccaaaaagaccgtcagacgatgaactgagcgggttatgtctgcgagaaacctgtacctgaataaaatcgatgtcttcaagtagcagttggcgttcttcactaagtgcctcacgtaggtcctctttgatcgcgtcgatctcgtcaaggtttagacgtcgatgtacctgtgagccatagcaacgtcaaaccattagcgagaaagaaaataaagaagtggccaccgaagatgttgtaccgacctcagggctctccaggacggctgtaatagatgagacggaaattgttgaccccctcgatactggccgctgagaaccagacgtcgctggacgcctcccggtcgcagtccctggtcgaagagcgacaacatccgccgcgtcgtttgaaatcgatctaggcgacaaatcctccatcttcggcgtcatcggcggctgatagctgctgtggttgaacgtatccgatgaggatacaacgtagtccaagacctccgtgtccttgacagaccgcatggccacctggcgagagggcccgtgcatatccgcagccaacagcttgagcttttctatgagcaaacgacgtcccgggggctctgggatgtgcggccgccttaccaagacatcctgcagccaatttcgttagcacacgtgaccccaaatccatcaaaaagagagaattaccaacccgaatgtcatcgttctgttgctgaaactccgtcagaatttcgaccagcaccgccaactcctgccgcaattcctgcagcggcgaccacaaaacgggttagagcgtttttcgccacaagttaccgcaagagagagagagagagactatcggcaatgcggacctcatttccttcgatcaggtgactcccgatagcactccgcagctctccctcttctgacgcgcacacattgagcttgagctcatcccagagcagcttgcggatctggaagtactcgctcgctgccgcctcgctgcgcaccattctgctcaacctctccgatttcctagcgttcccccactccaacacacaactccacaaataccaagtaaacgcacgtttccaccgctataattgttgtcgcttcaagttgaagttgaaccaacactctgcaagaatgatgaacgcacttcaacttgaagcgcttgagtggttgtattaccccctcttaaatatgatgcgcggtcttctccgcgtcttccgatcggacgcacacgtgcagtggctggtggcaccagatttccccaccgacttgcttcttgtctgcgtccagtagccgcccacacacagcgacacggaagtttccctccgacaaaaacatacactggatctcgtggctcttcgcagcctcctcctccataggaccagtccacgtgagttgggtcttgagcaagcccacaaccaccacgtgctctctcacctcaccgagtatttcttcgccctcctctgtgattgccacctccacttcaaccccggagaattgcatctccccatcaaaagtccgttgaattgtgacaccaatcgggacgtactggaacagatcggcttgcagagtccgagactccgctcgcaaatgcgccgcctggaagaagttcagcgggtggagggcggctctaccttgccgtcctggtttcatcccgctgatgtctccattctgcgctttagcctccacagccatcgacgtgggtgcttcaacgggcgaatgaacttgcaggcttatcggaggaagcagcaattctcgcgtcatttgctcttgtgccgcaatcgacccgaggtgaaagtcctcgcagcgcagtcgtccgtgagtcccgaagtacgtttcccactccacctccagcagatcgttcagcgtgtctgtaagctccggtccttgccctccccctagagatgacagacgcgggacttccaccacaaagcggcgagagcattgccggccgatttccgcctcgcacgtgacgtctccgctgtcgtcgatgtcacggcgtagccgaaagcgaaatgtcgtttctgtgggattggcgacgtggactatcatggcgcaatacaaatgatctgtcgtggatgcttgtgccgggttacccgtatcggtctcctgggtaggaggaatctgctccacgctgcacgggagcaacgcaaccgatcggagcattagagacggaagcgacacgagctccagtgcgagcttgctttcgcggtagaagacttcgcccgcgcaagtttcgtcagcatatacgaaactccattcgacctggatgtcgttctctgatgctgattcccccacggtcttgtttcctcgtaacgatacttcgaacggaatactcacgaaatcgccgctcgacagcggaagcggagaagatacaacactaccgcagctcagcgatagaagatgagtttcaacctccccggagctactactgggattgccattgtgattgactggggcatccacactgccgccacttgagtcagtcgatgctgggggcaagttgttgaaaatcacgcacgtctttttcgctgcacgccgatgctggacattcactgcgagcctgcaattggtgatttgctggttgccggtgctccgtacacgaagcatacacctcttcgtctctgtagcaaacatcgcgatacgcatcttggaagctggcggtggcttactagctgcagccttttccccttcagagagtgccatggagccgtgctcgcgaagggaaagcgaaaccatcggcagctcaccaacgacacgaatgctgacgggattattcagcgtgaacgacgtcgtaatgttaaacgtcttgatgaagcacccacgaacgtggaaagcccccactcttaacggctgaatccccagcaccacagtcttgcgcttctcatagggacctagagtgagaaaactggggtaacattccacgccatcgtcttgtaagaccgcactagcaccactgcccatcgcacccgctccagcgccctcctcaacaaacgtcacccacgctttcacctgctggagttttacggccacgcccgtcggattcgatatcgtcagctgcagctcgattctctcgtgaacaggaaagcccctttcatacatggcaggcgcatcgtcaatgtcgtcgtcttcgtcacccccatgctgtgctgccttccgcatcattttctgcttctcaaagggcgagtaaaagaagtccgacttggcagcttgctggctcgatgtgggttgcactccaaatatgcccaaagccgtcgctcgcgagagaaatgggtgctgcaagttgcagctcgagcgtaacctgagcttgtccacacgaagaaaagtagacaactggacttgttcacttgctcgcagcgttgtgcaatcggactccagcaggttgagaagcttccgctcaatcttggcaatctctgtcttcgaccgcaagttccatacagcgggaccctctgcctgcacgccaaggtgaagcttcccgtcgctctcgctgtcgctgatacctagcgtccgaaacgtcctgatcccaccagcatctccattcatcgcagcacttccgggctccctcccatccgccaagtttgccatcatccgtgaagctggtacgcgttcttccaagccaccagctcgacttgcgacaccattgtgattatggtgaggatgtgagaacggcgtgaacgctggcgacgccttcgtagaaatcgcattcactgctgcggagaattgttgccgcggcgtggccagaattcgaggtgtgttggtcagcgtcgacgataaggttgccgccgcgtttgacatggtagccgaaggggagttgataaagttccgcctcactctcgtatcaatgcccggcggaggagaattatacacgcccccttttgcatggagtccggtggtcgcacgatctgctggcatatgggcaacgcgaagtgacgtagcgggctgttggagatggtccactagtagcgctgagcctacagcgcctgaccttctcatagctggtgacgagggatccgcgccttgcacggcaatggagtcgcaccacaccagcatctccagcagctgaatacaataagtcccaacgaggaacgcgtctccgagcatcctcgcgatcgtcaggagctgccgtaggacgtggaaacgaataatcaaccacgagttgtcgggaacgctagcgaacgcttcggtacctggtgctttcctcctcctgttcctgcgatacagagtcgtgacttcccacggcaacgcgtctctcctcgcacttttatcctgaatgcccagacgttctgctgccacacgctccagcaagagagctgcctctaagtctcgttgccgctgagaccctttcgccacactggagggcgacagcagcagcctgagctgagaatccatagcaggcgcgttccgagctagcaaaagcgagccagcttcatggagaaagagcgccacacgtcgacggtggcccacactctccagcatccgactcgtctggatcaagaactcgacctggcgctgcggctggagctccggaaacagcatgagtcctcgctccagcgcgtcccacagcagtcgcttggtccacagactctccagcactttcgcttctcctgacatcgacgaccgccttaacgtcgcggccgacacagctgcgtaataccagccgaggttctcgatcagcagactctcgagctccgtcgtgccagccttcgcgtacagcgcgacggcctcggaggccttttccacgagctccgtcgagaacttgtccttcgcctcgcaatacaagcaatacacgtacccttccagcgcggccgcgagccacagggcgtcccccggcgcgccaccgctgcgtctttcttcctcgcgtagcatttcgactgcgactgtgtagtggtccatggcgtccgagatgcagctcaccagcacgctgtagtcgcccagcagcttctccctgcgcgccagctgccgcttccgccgccgattgcgcgggtccagcgcggcgactccggccgctagtggcgaagggatcgacgtgaacgacggtcccgttgagctcccggacgagcgcgacgtcggactcgcagcagacccgaagaccgcgtcccccttggcgtcgcgtgacagcaccaaaggagacgaggccgactgctgctgctgctgttgttgctgcatggcgtgcgtctgctgcggctccacgctgacgtccagcaggacgctgaccaggtctcctccgcttgcagctctgggtgtggacgcggcggctgtagcagcagcgctggacgtggccgagcggatggcgctctccagcgacatgagcacgttgacggccagcgtgtccatgacgacctgcaggtgcagactcacggtggactcgcccgtgccctccagctcgtggtgcacggggaacatgacgaggtccccgagcccctcgcactcggcggccgtggcgtcctcgaacgcgtgctcgaaggcgaagagcttgtgcagcagcagccccgggaagcgccgcaccgacgcctcgaactgcgcgtgggccgcgcgcagcccgccgctgagcgtcagcgacggactgtggcacacgcccagcacgcccacgacgcggcggctcgcgtgcgcgtcctctccatcgcaggcgtccacgcgctcggccgtcgacacgaagcggaagcgcagcgagcccgcgcccgcccagtccagcccgcggaacggcgacagctcggccgcgtagcccccgggccgcgtcaggctgcacagcggcagctcgctgtggcgctgcaggagacgcgcgtagcccgcgaacacgtccgccgggatgccgcccacgggcaccaggtacacgaggaactgcgccggccgcgtccagcgcggcggcgccgagctgctcatgacgatgccggtgtggtgtcggatacactccctttcaacgactgacttggagtttgtatggcgccgtcatatcgcaagcagttgcccaaaagatggccgtggagagcaggtcgcctgaggaggagccgctgtacgtgccgctcaaggtgcggcgccagcgcgagcaggagcgactgcagcggcgccgccagcagctgcaggagcgcatccagcacgagcgcagcgacaacgacagcgacagcgactcggagggcgagcggccgccccgcagcaagcggccgaagccgtcgagccctccgtcgccgtccgccgccgccggccatgacgatgcttctccgccgccgacgcagccgcagcgctcgagcgtgagtctgctggaccaggcgtacgagatgcgcaagcgcatggaggagcagggcgtgaaccagcagaaggcgcagcaggacgcgcaggaggtcaacatgctcaaggaggccagctacgtgcagaaggcggcgctggtgtcggcccacgagcgcgccgaggggatccactacaaggaggccatgcagaccacgtggaggccgccgcgcagcatcgcggccatgacgccggacgagtgcgacgccgtgcgcaagaagtggcacatcctggtggagggcgaggacgtgccgccgcccatcaagtcgttcgagtacatgcgcttcccgccggccattctggaggcgctcaaggccaagaacatcatgcggcccacgcccatccaggtgcaggccatcccgtgcatcctcgcggggcgcgacatcatcggcatcgccttcacgggctccggcaagaccgtgacgttcacgctgccgctggtgatgctggcgctcgaggaggagaagaagatgcccatcatcggacacgaaggccccttcggcctcattgtgggaccgtcccgagagctcatgcggcagacgttcgacgtcgtcaagcacttcacgaaccacttgttcaaggctggatacccggagctgcggagtctgctgtgcatcggaggagaagacaagcgccagcagtcggatctgatcgccagtcgtggcgtgcacattgtggtggcgactccaggccggctgaaccacttcctgaagctcaaggagatgaacctgcgcctgtgcaagtacatttgcttggacgaaggcgaccggatgttggacctgggcttcgacgaggaggtggccacgaccttcaaccacttcacaagtcagcgacagacgctgctgttctcagccacgatgcctcagaagttccaggacttcgccaaggatgtgctggtcaaacctgtgctagtcaacgtcggtcgtgccggtgctgctaacctggacgtgatccaggaggtggagtacgtgaagcaggacgccaagatcgtgtacctgctcgagtgtctgcagaagacgagccctcctgttgtcattttctgcgaacgcaagggcgacgtcgacgatatctacgaatatctcatcctcaagggcgtcgaggccgcctcgatccacggtggcaaggaccaggaggagcgtaatgaggccatcgacctgttcaagaacggccagaaggacgtcctggtagcgacggatgtggccgccaagggtctcgacttccccgatatcaagcacgtcatcaacttcgacatgccggcagagatcgagaactacgtgcatcgaatcggtcgtacaggtcgttgcggtaagacaggcgtggcgacgacattcatcaacaagagtgtgcccgagagtgctctgctggatctgaagcacctgctggtcgaggccaagcaaacggtgccgcctgtgctcaaggcattggaggatccctacgaagagttggagcgcagtggtgatggtctttccaacgctacaggcactaagggctgtgcgttctgtggtggtctgggtcaccgcatcaccgactgtccgaaggtggactcgcaggtgcggaagattggcgctggcaagcgcgacttcctcgccggaaagagcgaaggctacggcggagactcgctcggttaagagaactgatagcaatgcatcacataatctacttccaagtatccatgagcacacgcacgagcatgtcggtcgttacgtgttgaagcagaacttgtgtatttttgactgcaacaactgagcaggtgtgctctgctctggtcctgctatctggctgcttacgtcgagcgcgtcctgcattgctccgcctaggagtggctgatgccatgggcacctcactgtctaggagtttctcgcgcttctggaatcgcaacgagcggcggctgcttctcgtggggctggatggcgctggcaagacgacgatcctgtaccacctgcgcttgggcaaggccatcgccagtattccgacggtcggcttcaacgtggagaccatcaagtatgaaggctacaaactcaacatttgggtgagttggctttcgactggcattgagcggcgagggcagtctggaatgtactcacatgattgaaaacctaggacgtcgggggacaagacacattgcggccatactggaggcatcacttcaccggaacgcaggtgcaggcacagatagatgacaaattgccatgcaagacgaaggtctaactttgatgacgaccagggaatcattttcgttctcgatagcgcggacgagcagcggctagagctggcaaaggccgagctcaacggcatgctcgtagatactcagctccaggacgcgtgtctgctaatcatcctcaacaagcgcgatctgcccgacgctcgcgatgtccaagtgctgactgacgcactggaattccaggaaagctgcgcccagagtaagcgccgcgtcaaggttcaacccgcagtggccacgacaggcgagggcttaaacgacggcatgacgtggctctgcgagaatatgactgcgctgtgagcgctgacgcacgaggcctaggataaatagacatcttcatagttgagaggaacggaatacagtcttctttcttgatctgtgctgtatgcttgaatggggaggcgggtgcgtgcaaggggccacctcacttgtccactagtccaccggtaggaagctttgaccggagcattgggtgccccgggagagtgagtgatctgtaatctacacctagctagcttgcttgcactagtcgctgctctgtcttggaggcaagcgagcggtgcgggtcccaactcctgggagcagatcgtgactgcagcgcgaatctcgtctacgaccagtcgtgcgcgaatgccacaccctcgtacttcttggcaccagggatttcagtctcgtccatgaggatggtgccgtccacgtcaaagaccgtaataaaggaagtctgcctctgttcatcctccacctccacgctcttgatagccacaataaccgagtcatcggaccgcggcacaaacttgaaggacgagaacccgcgcaggggcgtgatcttgccgatctcgcgcacctcgatgctgctgaagtcctcactagcgataacgaccttgttggagccgcgcttctcgtcctccatgtcgttgtacggctcggtactgatgcgtcgcggcaggatgaaccactgacgacgcacgggactccactcgatggcttcgtgcaccacgtatccgggccagtcgcagcccagcgccgtgcgcacggccgcaaagtgcgacgtccagtcctcgtggcgcacatcgccagcccggtccatgacagcgacccagaggttgccgtcgctgatgacgttgccgctgttgtccgtgaactccttgcccacgctgcccatgtatagctcgccgtccttgaccgtggcccactcgtgcttctggcctttgccggccacgccgtctccctccatgacgatgtgctccgggatcccctgcaggggcttcgtggcgctagggtgctcgaagttcttgagtcggaagacgattcccgtgcggtcgtcgaaggccagcagcttgccgttgaaccaaaccagctcgctcagctcgaagccgcggccggcctcgttcatgcttgtggtgaacttggactcctcgccgaacgtgaccgagtacgtgtctcgcttctgctgcgcgctggcgctactgggcgtgaccttgagcgtggcgtgcatgatgtacgagttgaactggggcttcttgctgctctcatccttggacttcttgtccagatccgccacgatgacgatgccgaacgagtcgggcttgggcggcggcgccagcgtcggctcctggcgcatgttgtgcctcaccgagtcctgcgtggacggcagcagcagctgctgcggctggtcgttgccccagttctggggcgtgcgcagccccgccccgttgctgacgctgctgtgatggctgccgctggcgccgccgaaggacgagctggacagcgacacgtacgtgaaaatcgcgaaggcgatgaccagcaccagcgcgcggccgtggcgacgcatggccgcgagggccgcggcgggcggcggctgcgcgcgagacgaggacacggccacgccgcctccgggcaggggcgttccacgggcgtccgaccacatgctgctgcttgcgtcctccagagtgctgagcttgcgcttcttcttcttcttcttggcgtccacgcacagcacgagcatgcgcggcgcgccgctggggagggagtgaacacgtccgtttcgaccgcaataatgcgccgatgtcgctggaaggtcgcaccaagcggcggtgaactgactatgcacgatttcaaccaatggacggggcccgccgtcggccaatcacaaggcgccgcctggctctgtgacggggtacacaccgcccagctaagtacgaatccacgtttgacaagtacaaggacaatggcgggcagcaagaacgaggaggtggcggcgctcgaggcgctgcgcgactcgtccgcggagctggtgcgctacctggacagcatcaacgagaagctgcttcagatgaatcagcagaacgagagtaagtggctgcagctgtgctgggatatggaaggtgctggatcgtggactaaattgttgcagtgtcgctgcgtgtgctggagaactggtccagcgtcatcgccatctccaaggttagctcggcgtctgcagcggcagcgtcggccggaaagccgcaggcggagaaggagctcgtgcggacctcaccctagaggcgtccaggctgcgctgacccactaactgactgactgcgagctgcaccgcagaatagacggagtatttatactgggaatgaagacaaggaaatctggtcgtcgaatgtgtatgccttttttcttggtggagacttagtaggcacccgaaatagccgaacgtatggcgaaggcgagttggtgaccacgtcgcgaggtggaggcggcagataatcaagagcagtgttgatctgattgagtgttgaaagcacgggtctcgcctgcattgtagcagtgcagggcttgaagtagacgaccgacatgcgcaccaacgggttcgagaagcccttctcacgagaccaagcaacgagctggatcatccagctcaccctgatcggagtacgcactcacacgtcattctgcgttgccttgcatcgtgtggtcttgacttgatagcaattgaattctggcagagcttcatcaccttcgtatcggcactgttcagctgggataaggtgcaacttttgagcaagcagaacctatcgaaggctgtctaaccatcatccgtgtctctagtgtcttgcaatcctcctcccaaatgccgttctggtgaccatcgtcatcacagcgtggtgcatctgcgaatcgagggaccctgcaaagcccgtgagcctctgctaatccatttgctgttcgatcgctgtcgtgcacgtgctcactcgctcctgctggcagaaacccgcgtcgacattttttccatccgttctgcgagttccccacaaagagtcaaggtactgcggtctgtgctacaagaacagccctggactcgaccaccattgcacgtggctaaacacgtgcatcgctgagagcaactacgaggcgttttactgccttgtggtctcagcgacgtgccagacgctgctgcagactgttatcggcatcctcatgtgcactctgtggcagtccgaggtgaaggccaacgccgctgagggctgggatcaagcagtgatcgctctactgtggatccacaacgctgcctgcttatcgctgaccaactcgttcgttctcttggctggcttccacacgtatctgttgcgcgtgggaatgggcacgtacgatttcatcctggcaaacgggtccgatggtctgtgcactcgcatgctcaagtgcaattgcctccgccgcaagaagacggggaatcggaagcgcagccacgtccagcacggcgatgtcgacgaaaccaagagcgctaagggtagtgcgacgagatcgagaagggggtcgcccccggctgccatcacgcccgcgagtctctcagctccgtcgtcactgcggtcgcagacgtccctggagcaggcggcggcagcggcagcgctcgaggtgagcagaaacagcgtgcgagccaccacaagccgggaccagtccaagtcaagtcgagcgaccgtcaacccttcggaggttgctggcagcgttgcgccccccacgctgccggacatggtgctcagcgtgggcgtcaacgagagcgagggcatcttcgaggaggtcgacctgagcagccccccgaagcccaagaagtcgtcgggagcagtggtggccccagccacgacggtctcatgatgacaactagagggttgatcgatagagctgcttaaggacgaaatggcaatacacaatggttgccttgtggcggtgcaatgcatgttgaagcgagcccttttcctgcgacgtgtgcaaaaccccttgcacattcagtgtagcgatattgagaggattggtaatttgattggccaatacccatttaacttgcgctttgtatggtccgcggagtgattggctaccgctggccttgcaagcgggtctcaaagccatagtagcgttggagacgtcgtcgggtatttgccagcaaaacctcttttcaccttaaacaaggtgcgtcttcaccttgcagctgccgccggggatgccgtggctctactgcattgggccgcaatactcagatccagcatactaacggttgctgctgctgctctcgtacagatgcgtcacgttgctgctttgctgttgtgtgtgctcggcggaaacgccaccccctccgtggctgacctcgagaaggttgtgacctcgttcggcggcgagttcaaccaggagcaggccgagaagctcgtcaaggagctcgagggcaagaacatcgaggaggtggtcgctgccggcaaggccaagctcgccaccgtgtcggtgggcgctgcccccgctgctggcgccgccgctggcggtgctgccccggccaaggaggaggagaaggccgtcgaggaggaggaagaggtcgacatgggcggcggcatggacatgttcggcggagacgaggactactaagcgtcgtcttgctacgatttgccacgcgacctgccgctctcagcgcgtcgggtcgggtagtaacgtcagcttaatcgaacgcgcatgccagccatgcatgtgacgccattcgcacacagcacacttctactcgggtgttcggtctccagcaggtgtttcgttttcgtggataattgttcgtcgcgctgcggtttgcagttgatttcgttgccgttacaggacaggttgcaggaactacgctatttaactacgtgcctctcgtctagttacggagtctgctctcgggcgctctgcaggttcagagtcaactcgaggtcaaccaggtcagatcttctagccgaggactttgtcactcacacgacggcaaattccagcccagcccatagcagagatagcgccaagcgggaagccaggaatcgccattaggcgctccaccggcagcatgtagccctgcggtagctccaccagaggctcattccaatagtagagcatagcgagccccatcaacaccggctgcggcaaaagcaacgcaaagggttagctcatcttccagcttgtagttgctgctgcttgacagctcccagcactgcagacgtaccgttcggatgcggtcgaactgcttctgaagctccgatggcgcgcttgcagccagccgctccactgccacacgacacacagcacgtatccaaatacatgaacatcagccaagaaggcaagaaaccacttaaatccctcatcgccccaacgcacccgcgagctcctgcatctccttcttgagcgcgttcatcttgcgcgtggcctttgcctgctccacgaacgtctcgaccgagttgaggcggttcacgagccgcacctgcgcgttgtactcgcccagcagcttctgctccgccggcgacagctgcgcgcctcgaccgttccacagcttcatggccaggtccacggcgaacacgaccagcgcgatcagcagcacgtcgtacaccttgagcgccgagatcgtcggcagctccatcatcataatcgtcgtcaattcacgattcaaagtcgactttatatcggaaatgaatcgcacttagtccagtcatagtgaactcaagtcttggcacttcgagccgaagcaaggatcgccaccatggcgcaggacatgcgggcgctgcgcgactacgtcacggccatggacggccggcagtacgagagcgtgcccgagggcgtcgtgtgtctgctcatcacgcacagcaacctgaagctgcagatggtggacatccggctggacctacacggcaccatcggcgagctgcgccacaaggtgtaccagcacacgggcaccaagcccgacgccatggagctgctggtcatgcgcagcgacggctcggtctacgcccgactggacgacgaccggcggatgctgggcttctacagcgtcgagaacggcatgcggctgcacgtcgtggacaaggacccgttctcgctgtcgcgaggcggcggcctcgaggacgtctcgctcgtcaagaagtacgagatctccgaggaggactacaacaagcgtaggttgcggtgggatagctgcgatgctgtggattcgtggtgactgactgacgatggctactggcttatattgacaggcgagaagactgtgcgcgcttacaagcgaaagcaactcgccaaggacccgaactggaagcccaagaccatgatgaatgccgctcggcctgctgcggacccggctgctgttcctggacccgagagcgttgcgagtatgaaggtgggcgaccggtgcgaggtgcagcctggaggacggcgaggacaggtgcagtacttgggcgagatcccggagatcgcacccggctactgggtgggcgtgcagtttgacgagcctgtgggcaaaggcaacggctccgtcaagggcacgacctacttcaagtgcgagcagaagttcggcggctttgtgcgtccccacaacgtggcggtcggtgacttccctgtgctggacccattcgcagacctgtcagacgacgacgacgagctgtaggttgcagtaggtaggtaggtagccatctgaagctggtgctggagcagtagcagcgcagcttttaaagagtccggcctgcaacgaccgtggagctgcatcataaacgacaggagcagagtgctacgccagactgggaaatcaactctaacttactttccacggtgtttctgctctgctaatacacgcgctgcgtcgtctcctctgcccccgcaaaactcctgcatcctctgtcgcagtgtccggggcctcctccgtcgacgcagcgctcccccaacgagctcctccttacacctcggccttgcgcgtgatctcctcgacgttccagcgcttgcgcttggacagcgggcgcgtggccgacagacgcacgaagtcgccgatgttgcacacgttctcctcgtcgtgggccatgaacttcttggtcttcttgtagtacttgccgtacttggggtccttcacgatgcgggccacctccaccagcaccgacttctgcatcttgttggatacgatcttcccgaacagcggcttcatggcggcgacgtaacagctaagctaagcaggcgaacaggcagtcaggcaggcttgagcactcggcggcgctatttgtctggtcagagggctccacagccgcagaggatcattgaggtatgtgattcgctaaaattgggggtatactttcagccaatgacaggaggtttgaaatagtcgccacgtcacagagaatccattgccaactgcaggcagatcgcaataatgggcgagagctcctttgtgccgtacctgtacgtgcccagcgccgaggcgacgtacgtgaagctggtgacgccctggggcagcgtgcacatggacaagggcttcctggagcagctggctgtcagcgtgggcgtcgtcgtgctgacggtgatgctgtggcggtgctccgcgaggctcaacgcgtcgctcaagaagcgatcggacgccaagaaaagcgggcggaaagatggagaagaagaggagggagaggacgatgatggtgacgaggaggaagaggatgacgagcccaggtccgcgctggacgagagtatggtcaagaagggcgaccacagctactactacgcgcaccagcaccgcgagatcaaagacgacgacgagagcgtgcaaaagaccatggtctcgtcctacggctggagcgacaacaagaagaccgttaggtaagtagtatgcgatggttgatgctggataaaaaggtgcttcgggctaaccggtggaactgtgctcgcagcatctacctgactgacaacgtggtgaagaacatgaagggcgagcaattggttttggtgaggaatcaaatatgaacacccgtgtatcttggagtggaatgtggcaattgctgattttcatgctaatgtggcggcaggaatggaccaaaacgtcgctgtcattggacttgctgaatgctccgggtggtgaccaggccaagagtctggtgatctccacgctgttccaggaaatcacagacgtgacgtggaaggcgaagaaggacacgctcacaatcacgctgacgaaggcgcaggagttgccctggaagtctttgaacggagctgccaagaacatggaggatcacatcgaatacgacgagtctctctacgactaaagactgcgtacgactgcaggccacgatatagaaacaccgcgttggcggttgctccagtgacccaccactacgagtgtccgagtgaagattgcactctaggccggtgccttgaattcaatatattgtagatgagatttaaaccctgcctcaggtttgcccattatgcttgtcgagtctgaagtgataggcagctcattccgggctccaaaacttgagatgcgcggtgtcgtatgtggctgtgaagaggctgttggtcgacgagaacaccacgcccgtcaggagatcgttgggtaccgcctgcgaactcaccagcttcacgcgcggccccgatccgggcttgctcgacgaaatctcccaaatgttcatgaaggtgtcctcgctcacagacacagcaaactcattgtgggcgtccaacgccgtaattgcgcgagtgtgagcagcgatttccgcgtgcacgtgaaagctctcggggttgtacaaccgcaaacaccccgtgaggaagcctgcgaccagccagttttcagccatgaaggtcatggaggtcgcgggataacctttgctcacgattcggtgcgtgacctcgaagccgtccccggggttacggatcatgatagccccgctcatatcgctgctggccagcagcgtgccgtcgagagagctctcaacgcagcaaataggctcgtcatgtcccgtcagggtcttgcacacttcgaagccagaaccttctccagctttagcatcttcttctttcccaatgacaagtagcttcccgatcgaggtgcctgcgagtgacacagtagtgaaagacattgtgaggaaagcatatccaccacaccactgcagtatcattttacgtacccacgacaaggcgcaactccttcatgtgaacggagcaaatgccctggcagtagagtgagtcgcctgtacgcccagcttggtgagattttagacaacagcgtcacagttcaatggccaacacgcaggtaggtggatagacaaataccttctacatcgttacccacgatgtctttgagcgcgatctcggacagactctcttcgcccgtggcatcatagatctaaaggcaacgtgagacttgtgttgatgttgcgtcaatcctcccagggtataagttgattggcacctgaatgccgttgtccgaagcgaccacgatgaccaccacctctttcagggtgcagaagcgcacttggtgcaccgccgacttctccgcgcacggcagcttgtgggtcatgaagggcgtgtgcgtggtgtccacgtacacgacatcgtcgacgctcgcgtacgcctacacatttccaagaggcggttaggatcgaacctctaggcccacagctcagtcacagcagagcggcaccatcatgtcgccatgcttggagaggttgttgcacacgtaggacgccgtgtaggtcgtcggcttgagctccgggtccgcaaaccacgacgctgccatcactgcacttccgctcgcgctgtccccggtcgcccgtcaagcagttttcggttctgccgaagagtcgtcaagatccgcaaatcgacttgttgaagacatggacctcgcgtccctcgatggagaccgggggcgcagtaagtaagacgctgtgggatctatcatgcagtttttattggttgagtgtattggtgtagtctagtgggcggtgacttcgagctcctcgatcagcacgcttttcggctgcgctggggcctgaactgggtcgagttcctcttccgagatggagaagagcttggctgtggcgcccatgccttcgcccgtcagcagctctgaggacgtatcgtcgccgctggatgactcctcttcttccacctccatcggttcaggctcggacggttcggacgctggcaatgacgactcaactgcagctacctccgacgagatcgtctcgatcgcatcgtgcgcaacggggtactggtcggcgtcggcagccagtgcaaccgtgatcacaggaaactcgatcacggccttccgcttcaagttgctctcgaggcattggttgccgtccaagcggtagtactgcggctgggatgctggggtgaactctttccgaaggagcagcaatatatgcttctcccagtcgaccacggcatattttttcagcttcccgcggatagcaacattttcctgcatacaagaggctgcataagcactagcaacaggaagcatacattcacatgaagcacccacatacctgacagggggtaaagtatttgctgagcatggcgaagagcgtgtccttttcacttgcgcgctcctccgaatgactcactggcacttcagcactcgggaacgtccattcgactcgccagtaaagagtgttcttcttcatgtccatgtaggatgagttgcgggcccgcttgctcatgcccggggcgagcagtgtcaacgcaacgccgcgcttggccgagtgctcagcaaagagctgcacggcaatggggaagcgcgctaaccagtcagcaggaatatcggggttgatagagcccgatggccctcctgcgttgctctgtgtagccgccactttgcgcttcttgttgctcgtgtagcaccgcgcgttggcgttcagcgtgcttcgagaccgcgcggcgctgttcgtcgagcgaaaaacctcctccaggaagaagaagtctacacaaccatagagtgagcatggtcaatacaggactaacagccaagcctaggtgagagcgagccttaccactggagagatctgcgtccgtgaacttcttgagcgccacatacttggtgcggtcgcgcttgccattgcagtcgaactgtcgtccagcaagccgaatccacatacacagcgtcagcaaatacacatacatacacccaccaccaccgacagcagcagcatttgcactcgcctggttcttgtggcccacgcagcactgcagcgagcacgtgatgcgctcgcagcgcggacagcggtacttgacgtcgctcttgccgcagccgacgcacacgggcgcctggtccgccgctgcagctgttgccgcgtcggtctgcggctcggcgtcgtccagcgcgcgcttgctgcctgcgtccaccatcgcctcggcctgcggattgatgaagtgagcttgggctgacgtccatcccatcacggcttttggccgattggctgtggtcaccgaatccgggtcgctcaaagtgtacatctgctgtcccgaacgccgattggcaactggaatgccagtcatttcgccttaaagttgcagcagcagcgacgcgatggtgggcgtggacctggagatcgatgagagcaagctgtgggacccggccaagcgccaggcctacatggacgcgctgccggacatgacgctgttcgaggaccacgtggtggagggcgacgagatggtggcggccatccaggcgctgatcgaggacggcgagacggccgagagcctggcgctgcattggaagaaccagggcaacgacatgttctcggacgccaagaaggcgcatcgaggctacttcaagaacgctatgaagtactacaacgacgcgctggcctacgcctacaaggcgctggcgctgcccgaggacgagcgcgacctgtcctacgacatgcgcgagctcacctcgcagatcctgtgcaaccgcgcggccgtgcagctcgagctccggaactacggcagctgccgctcggacgccgccaaggccatcaacttcgacccgtccaacgtcaaggcgtactaccgaggcgccaaggcctcgaggatgttgcgcaagcccgccgacacgctgcgttactgcgaggagggactcaagcgcgacccggagaacaagctgctactgaagctgcaggtggagggccgcaagctcgtggaggagctgcgcgtcgagaagctcaagcgcgagcgagaacgcatgaagcgccgcgcggccacggacaagtaccgcaagctgtgcgcgtctcgcaacgtccgtgttggacgcgctctggtggacgatgagcgcgtgcgtcagtacgagggcaaggccgacctggaccctgagagcggcaacatgtactggcccgtgctctttctgtacgaccagcacggcacgtcggacttcgtgcagttcttcggcgagcacgactcggtgatcgagcacctggccaacatgttcccggaggacggcccgtacgccgagtgggacacgaaccaggagttcgtggcctccaagttggtggtgtacgctgctgcggacatggtgctgccgtactcgtcgcccaaggagtggcacgtggggctcagcggcgagaaggaggaggaggacgaggaggtgaagcgtatccgccgcgaggagcagcacgaggccaagacgcagtactggctcgaggtgtcgcccttctgcacgctgcagcagctgctgacccacgagaagtacgtggtgcccggcatccccgtgctcaacatcttcgtgcgcggctcggaggcgctcggcaacttcctcacgcgcatcgagcgcaaggtcatcacgctcgatgcgccacagcggtaaaaaggatggcttcacttttgcgtgtgcacgattggccaaatatacattctattttcttattcttattggttgaaagtgaaatgcgcgtcaactactggctgaaagatccgctcgcctacaacaacagtcttctatcgacctgcagccgagcacgatggtgcgttgcggagccgtgctctctctgtctcgaggctctagggcgatgtccgagccgcacgcgatactgttatatggtgggtcattttattctgaccctgtttgcattctgttgtgcttgtgtgcgctctccttgtgccctgtagtccggcctgatcctcaaccccaagccgttcctgaccaacctgacgggcaagcccgtggtggcgcgactcaagtggggcatggagtacaagggcgtgctgctgtcggtggactcgtacatgaatctgcagctggccaacacggaggagtacatcaacggagagctcacgggcaacctgggcgagacgctcgtgcgctgcaacaacgtgctcttcatccgcggcctgctggacgacgagaagccgcccgccgaggctcgtgcggacggagcggagcccatgacggatgcccagtagactcgaaagcaggcgcgaaggcgtgcagtgtccgccacgagaagtagaaggacgaaggcgggcgggtattattaaaagggcgtagacgacggcactgtactggtgagggtgggcaacccctccatctactagaagagaccaggcccatgcaggtggaaggctggatggaacccacacgcgagagtcagaaaacgcgataaggaagatcagccccctgtgtcaaagtgagaagtgtcgatgcgccagtcgaagcggttctcatacacttgttgtcattgctttcgtcctctcttatcctaccctggtatacttccacacggtacaatctactactgcattgctctcctcggttccttttaaggtactcgccacggattccgccacgtgatgctaatatcaacactcacttcattgataccacacgtgcatgcactacgtgaacgcgctccttacgacttcaggaaaccaaacagatcatcgtcatccagctccacgttcaggtcgatccgatcccaacggtacagatccatcccatcgtcttcgctcttgctatccgttgccattcctgttgcattgctttccgtcgcggctggcccgctgggctggccctcgcctgtcgacgcaggcaccaccatcgcttcgctagctgtcggaactccagcggcgatcacatccgttgatgcgctcgttgtctgcgtggatgaagtcgcggcggataacgacggccgggacagcagattcatgtgctgttggaagtgctcttgctcttgctgctgctgctgtcgttgttgttgctggtattgctgcggctgttgctgctgaagctgctgcgaactggcccactgagcaacttgtggattgcctctactggagctcgaagggacagagctggtaacaatgttccccacgctgctgtgtcgggcaagatgctgcgccacctcgaccttgcgggttagcatctgccgatggaggttcatttgggcttgcatggcgagatgcatctgcatctgcagatcggttggctcctcgtgcagcataaaaccctccgcgcctcgggccaccgcctcgttcgtcgaaacttgagcttggggcgcatgaggaaatataccgctttcacccactggcccagtcatgccagcaagctgtggcgacatgagggagttgataatgctccactgggggtcagacagctccggcatgcctgcaactcctgctccagctggaagctgccctaacggatagcgatacgcggccacagcagccgctgctgccatttctcgatcgtggtcagtactcttctgggcgtgagccgcagcgtaggctggcggcaagtgctgaggggctatggggatcaaacctgtcgataccggtatcggaacggcactcatcatgcgctcatctggtgtgtgaggctgtggtcgcaggtgactacttccatcgatcggtggctcttggtgtgcgctttgcatgagttgcgagtagttgaggccacgcgcaggtgcctccgcgacagaactacggcgtccctgaggcgttccctgaccttttgaatccacatccatcctgctgtcgttgttatggctatcgccagagtccgagtcgctatcatcgctgtcgctatcgctggcatgccctttcctgcgcttcgaattgctgattggaaacacgaacatggtgttggcctcgccccctgcaccgcttggccggtgctgagcctgccgccggcgacgctttaggttgcgcttggcgctgcggtcgtaatactcgagaaactccatgcgagagcgctcgtagttgagccgatacttctgcaggtgagacttgaggtgctccgttgtgagtcctgagttcggtccggctgcctccatcaacttttcaagcaagaaatcagctgaacaagttagtcgcgctcggcagcctcgtactcgggcagaaagcgaaatacgtacagctagtagagcctttggggacgcattcttgagaccaactgcaacgcacacgaatcaaatgtcaatctcccgtatgaacaaaatggcgtggggctttgtcaaccagcgcaccgtcgaagatggcggccacgaagaggcggtggaggtcatcgggccagatgaagcgcttggtcttacgctcgtacttgcgctgtttggggggcggcttgtcgtcgcccgtggccgcggccgagtcggccttcctccgtctggagctcgaggatgaagggatggctgctgcggggccgccgctgctgctggcgtcgcggtccttggcgtcgctggcgggcgagcgcgtcgggttcatagagggcgacgtggaagtgtcggtgcgcgcctcgtcgctgctgtccagcgccgtggtcgagggccgctggatggagagctgcgtgcgagtcactggcgggggagcgggggccaaatttgccattcagctccagtccaccgcgagcgccaaggatgaggccggcggatggggagcagaagcgcgaatgcctgctgctccgtctggtggtcaaatctcctgcaagtcgtaggcagagaaagagcgagcgcggcggcacgccgagatgtctgtcagtgacagcgctgctgctgctgatggttcactctgcccctggctggcgagctgagcccctgacgcgctttggcttgttgcgggcggcctcgacgcggtcttgacacggagatcccggccgatagagcacgcaagagggcggaatctccacgggatccgcgtgttgcaaaaggtacccacttatattttattatttatcgcagcaaacacgcgctccttacataacacgattgttggcatttgccgcccgatcctcgacgaagatgtcgtggcctccacgctgctgcttatacatgtagggcattgctgctgctgtcgctggctcggggcagatttcttgctcgcctgttttgctcgacgagcgtgagcgccgcagccggcgccattacagtgtaatttacacagcctgcaacgagggacagagccgccgccccagatgattcgcgcccgagctgagcatacagagggcgacacgaaccgagtggggggaatctcgcggcagttgcggcggcgacaccaacttcagctgccaggttcggcagactttgtgtttgtcttgaagcctgcaaatggggtttcctggggctcagatggagtcctgatagaagcacgaacggtatcgaggtcaagactatctgtagtatcgttcaatgcctggcaatctcacgacagtgctgacaactaccgtacagatcaccgctcaagaccgtgccttcgcggattttaacgttaagctggatcattgtactataaagcgaacttcacaagaggcacttagtacagagaatacactaacaatataagtctaccaaaggattgttggagagggctgtccaaggtgtacggggtacggcaatcgacccatttaaagctctttggcttgtggtaatcttgaacgccacgtcatgaactagggcttcgcggggactgagatagcgaaaataaaacagaacagatatacgcacagcgcacacgacttaggcgcgccgcacttgcggcgcaccagtcgtccgcgttgtgcgtaccgcatttcgcatgtagagcgctacagcggtttaagatatacacctttatttagaccaatcagagatgcgagagagaagtccgtgggatcgcatgtagagagatacacccctaatttgagtattttgcgcatttttgcattcacattgagccacctgtaagcgcgcgaaggcagaggggaagagctgcgcaccgctcgccaacgtcgcgctgccccctccccgcgcgcttggaggcatacgcctcgtcggagtgatagttagtagccacgcctggtgtgggcccagttgaggcgcgcctgagtgcgggatatggggagcacgaggttaaaccacaacgcgcaagctcgagagagcgcgcaacacggctgctgcataattggttaagtgatgtggttcctgtgcaacatagatgtagatggcgcctagacttgttgctaacttaagcgccatcctagaggagatcgctccgcgccatccggtactacattatgagcatccacaactacagtaaagtgtctcgataaggaacgggcgacatttaatattcttcaacagacatcaagctcgctttgtacccactatcagtcaactgtatgaattagtatgtattttaccaattcagagcgttgagagaaaggtagtctattgaaccttggttaatagccccctgaaattttcgaagtcttttgatcagcgctgtgtggtgtagtagcacgcacaaaatcgtcagatgtggcaccctagcgacaaacacaacaacagccgagctagtcggcccttgttggcctgcgctgagatgtcccccagcagttcggcccttccgggacagtgatgtctcgtcctcgccgagaccaagtaccccaagccagtcaatcacggaagccagctgagttacctgactccggaattagaaatcccgtgccctccgccaaaggacggacgacggccctcgtgggcttttacgggtcgccgagagcaaaggcttctcgactcagcattcagtgcccgggacttacgggaacaccggctcgcagcggtggcgagacttttccttcgcgcttcgcgagacacgcgcccaacccgggccgaccttaatctcttggcgctaccagtcagcaccctacaagctatgcctctcgggtgctgacagcagacataatccggcccgtgcagggacttactggaagcgcgtgcacgtgttgtggacctagaaaattctgctctgtttggttgttatctctgtcgggcaccctgaaggggcgcctctactattcctaagatcccatacaaataccaaatgaaagtgggtggttttggatctcggccgacccttcgctgagcgcagcgacgcttgagctcggttggtccggataaggcgtccggataactcttcgaactcggctgagccggataacccagtgaactcggcggagcgacccgtgaactcggcggagcgacccgtgaactcgactgcgcgactcccggactcaattgagcctggttaccgtatcggacggtacatggtaccgtttagccgagctcggcggcttgaactccccatgatctcggctgagtgtgtccagtgccttcctgaactcgactgggccttcatcactgggcctgccacgtgtcaccaggtcgaagccggtgtgtcttgagtatctgacaccatcagccgagttcagcggtcgtccaccagcgcattcttgcccactgagctcggcatcccgccgagtagtacttggctcctggtacgttgttccactgcggccatacaaaacttgatgttccctacaccacaactgccccggccatgctacgagccggagtggtgagtggcctggccaactggatgtgtcgcacgcttgatttcgtccaatccgatctgtcgcaaacactctgagttcacatttcccgaattcgagtggccagaaacgcccgcaacgccagctcgacgcccttgttccgtgaaggtgagacttgcttgagccttgatctttggtataggccttgtctgatgcgtgggcgccgctctgtacacatgtaggtgcccctatcgctcgcaccaaacccggtgtcggatcacttcagcatcgaatcaacctggatggtggtctcggcgtggcagccggtagcagggactgaaccatatgaagtcagctggtgcccctgtcggaaggtcggagtactagcggtgatgttgggtctgccgcagcaaagcgagtaggtgatgcaggtgtcggggaagtgctcgattggctgcaataccgacgaagccgagcatctctgtctccgtcaaaatgagcagccatggatgctgccagcgactcggctgacccggtaagcacgtgcctctcgtttcggtgcgtcgagtggagcctaatagttgtcttggcatgctacaaggcaccgggaactcggcaggtcaagaaacgcttccccgatcgggccgcgctgagctcgaaatccaacccagctgagcttattggcgagaagtgcagcagcaagttgaactcagctgtgtccgaactcggctgtcctgacgactagctgctatccgctgaccttgaactcggctggacttgagcacaacctccgcttgatcggctcaactagcctggtaagtgtttgccccactcactttggtgcgttgagttagctctgtgtcattttatagccgaacaaggcgatcctgatgcgtttgatgctccagtcgagttgttctgaacgggtcgagctgggttcagtggtcaacggaccttgacttcggcatgtctcccgctctgttagaccagcttaccccgactgggctcagcttggttgggatggtggtgagcaagctcgactggaacagcacttcattcggtcacattccaactcggctcgccgcgagctcggctgcgttcaaactcagtttgaattcaatctcttcggttcagctgtgaagcgtgttcagcctcagctcggctacacctcgaactcggcatgagcgctctccaatcggaacatggtgcgtttaccagcactcaactaggcgaacttccgaacgcgatctcactgaaacttggcgtaccgcaactcagcccagtgtttccttccgttgaagtgagtacacttcagattggcgccatccaacccggggcactactggaactcggcatcccattccagcttgatcgtactccaatgttctcggcgtcgcagcaacccagtgcgaacgcgaccacattaggacgcagcgtgatctcagcctcgcttcagctcagctctgctcggactcggctgcgcataacgtcggctcgacctagttcgtctcggctggaatccgacgagaaccgggcacaagaccgagatgtactggaactggacgcgaaacggcccaacttgatcgtggctttgcttcggcaaggttgctgttcaatcggctccactccaacgaccagcgcttcttcgaagcgttgctcgaactcggctccgttccggcttggttgaactcggcctcacgacatctcggtgttaaactacttccacgcagagtgcactgtctcgcttcaactcggctctgcttgaacgcatctcggcttcagcttgactgtggttcaactcagttggtgctgacctcggctgcacttgtacctgatcccgattcagctcggattcaagacaaacctctgctgcaattcgcctaggcgccacttgatccccatgttctgtggctctgccacgaatcaacccgggtctagcgcgactcatgttcacctggaattgattccgcttcagcttagcccagttgagcaaggtgagaggcaagctcgactgagcgaacgacacagctggctgcctgaccagctctgtcccttagcggaagtatcagcgctttgaaggggtgtttcgacttggctatgctcgacccctgaccaagctctgctcatgttggctcaatgtgaatacgatcgcggccgcgtggaatccattcctcttcagtccagctttggatgttgggtacacctttgcgacgccgtgactcggcgatttcaccgactcagcttcaggctgaccgcagataaacgcgatggtagccctacgtcggatcgagtgaagtcggagttcatcttcaaagcaggtgtctgcttctgctcagctacggatcaactcggctcccgttcgagatcgctggcacgtcgacattctcggcgacgcgcctgcccagcgtgcctccgctgagctttgctcaactccagctttgctgcaacttcggtttgttcaccgccgccgcgcatcgaccgactcggctagccgcctctcggtaaacatggagtgattacggcttcactggaacatcgtgcgaactcgacttcgcttcggctttcctgcttgagcgtggctccatatcagcacagctccgcgtcagcacacctgcgctccaattcagcttgagcgcacaacgggaagatcgttcatcgacttggtcggaggtcccggcggtcgtacccaagggtgtcgatcgtaccgccgcatatcacacacagtgccccagtgggtgttcacggacccagtgacgagtcaacacagcttcggcatcgacggctgactcgctcaatctgtgcagacgcaccatcacctccctcagcttcttcactgggtcgttgtcagaccagctgggcttaaccgctcagctcggcaactcggctgagacttcgcgccgactccaacgctaacccggcgaatgggcttcttgctttccagctccatcttcgctcactccatttcgatatcatgtaattcatataatccatacagttgacgcagtatcattcttcgactcgacccagcctgctgtcttcactgagtcggcggatcatcactttggtgcaatagccttagaccgcatctgcaacttgcaccatttgcagacgggtttcacatttcttcgattgcccctagtcgagtggaaaggtttcccacgagacgttcggcatcgaatcccaactcgggcatttcgcgctggatgccctcgtcgctcgttgtatcaggggcggacggtcccctggagcgacggcttgactgtcgtcgtccgcatcgtcaccgagctcggctgcgaggttttgttgggctcgtcgaggtttctccatgcgcccaacatgcagcgagaactcagctaccccgctgagcaactcggctttcttcaattcttcatcataatctccgatatttccatctcttcctcggtcttgggtgcggtcgtcgccaaaccgaacggttgggaccgcttccatcatcatgtcggcgatccttccgccagctgagttcggctttgtgtgaagcgagcccccagccgtcgctgggctggcccagctcggcaaagatctccccttgaccatcttgctcagtactcgaaacttggttgacttggtaccaacgaaaacaaaccaccctgctcccgggtcgcggcaccagttgtggtgtagtagcacgcacaaaatcgtcagatgtggcaccctagcgacaaacacaacaacagccgagctagtcggcccttgttggcctgcgctgagatgtctcccagcagttcggcccttccgggacagtgatgtctcgtcctcgccgagaccaagtaccccaagccagtcaatcacggaagccagctgagttacctgactccggaattagaaatcccgtgccctccgccaaaggacggacgacggccctcgtgggcttttacgggtcgccgagagcaaaggcttctcgactcagcattcagtgcccgggacttacgggaacaccggctcgcagcggtggcgagacttttccttcgcacttcgcgagacacgcgcccaacccgggccgaccttaatctcttggcgctaccagtcagcaccctacaagctatgcctctcgggtgctgacagcagacataatccggcccgtgcagggacttactggaagcgcgtgcacgtgttgtggacctagaaaattctgctctgtttggttgttatctctgtcgggcaccctgaaggggcgcctctactattcctaagatcccatacaaataccaaatgaaagtgggtggttttggatctcggccgacccttcgctgagcgcagcgacgcttgagctcggttggtccggataaggcgtccggataactcttcgaactcggctgagccggataacccagtgaactcggcggagcgacccgtgaactcggcggagcgacccgtgaactcgactgcgcgactcccggactcaattgagcctggttaccgtatcggacggtacatggtaccgtttagccgagctcggcggcttgaactccccatgatctcggctgagtgtgtccagtgccttcctgaactcgactgggccttcatcactgggcctgccacgtgtcaccaggtcgaagccggtgtgtcttgagtatctgacaccatcagccgagttcagcggtcgtccgccagcgcattcttgcccactgagctcggcatcccgccgagtagtacttggctcctggtacgttgttccactgcggccgtggagtgtgacacaaaacttgatgttccctacaccacaacgctgactccttcctcttgagccacggcgctggggttggaggtgaatctggaggttcagcctcaatcgtgatggctacatagcaatccagagtgagctgtagccgaagcccatttgtcctggttgctggcttgttccgttcactgcgtgccactgctgctatttgcctcaggcagctggcccacatgtattccaattgttgtggggctctccatgtcattccttcgtggacgacttggtttcgaatttgccacagcagtgcgtatcccatactacacagactccaccagatccgcccgagagcgtcttcgtagtctttgttccatttaccatagcattccaaaagcactcgccgcattctgtcactgacaggaggagctacccgtgacgagatgtaactcttatacgccttgagacgactgctggatatttcatggccaagccaatgctccacacaacgactccaaaactgttgggctcgcttgcagccccatgtaatgtgcgtgatcgtgaccttgcctgccgtgacgtcctgggcgagaagacagccatccgtcggacgctcgccttcgtaatgcaaatttaattgttgagcggccattcgataggccacccagacctggtagtttgtcaacgtgtttcgatgcgcccaaagctgttgcggtagttgactctggagacctcgtatccagtcatctcgttcacctcggacttcccacgtcttgagcagcttatcgaggtcgggacgggcgtgtacccgaagctgtttcttaggctgcatcttcaaatcctttataatgtttcgatttcgggtccttgctggtacttgccaagggaatccgtgaatccgggtgtgtgcatggaatactactccgtccaagtgcttgaatagtttcgtcgcgtcctttttggcgttgcgctgcgatacgactttccaattgagcccgttggcttgttgctgcagcgtgattgtagatattcctgcattggagactcccactacaatagaatcagcctccactgaccagacgtagctttgcgtgaggcacggtggtttccgtaatagaagctgaggggctggaccgagttgttctcccacttcaattcggggcgaggggagcagaatagcgatcaaccatcgctccagtttggcgatggtgtgtccagcctgacatcccggtgctgttggtactcgtaccgtgtaggttgttctgtgagtcctgacgatttgaaagctcgcgatcgaggctaccgcgattctgtcgtatttggctcacgataacactggctcattactatctgggatccacgggttatccgcccaagcgaatatgccccagaacgccgtgagctccggtatttccagtcggtttgacggtagaccgcccaattccacttcgacggaccaattcagagctttccccattcagagctttcccattactaatgggaaagctctgattagaccacagggtaaaaaaaggagtattcgtaaattatgagagtgtaccgtagataccagagttatttacgagacaatactacagcgcgcaatcagctcctttttatccctttagctacgaggcttcgtacgggtccagtctgacctatacgacagctcataattgactacaattggctataatacattgtacgggctaggtagaagctcgcagagtcagccaacaggtccaagcggacctgtaccatagccacatgtgagcaaatcaacaagctggtgcttaccgatataagactcgggcaggttctcttctattctacaactatcgagcggcaaatcacacgaaaaccaaaatccataagtataggtttgttgaggggttgacgagagctgccattggtctaaatggtccgaaaccgcgttgtggttggttatggtacatgtccagggggacctgcactgcaaagctcgtagctaaagggttatggatataccgccataattactataagatgcggtattaacacatctaactctctcatttagtatgcagctgacctgcataggcaaagctcagaaaagtataatacgatggtgcttaatccatatttttctatagatatctattacgagattgctttatctaataagtacatttctttcgcaaaataccagcccggttacttacgagccactcacggcgcgcgataagtctgattgaccctcagttttgaactttccatcagcaagatgccatccaccgcggaccaagtcctcgaccgcctcacgcgccagtgggatgacgaggttgccaaccttgtgaccagccatgggaccttcggcgacgttgcccgtcacgtggaagacgaagcatcggacgccgagtcgcctatcctcgctgagtacaccgccgcagggggtgacgacacgctcaaggcgatgacgaacttctccgccccggagctggacgctctttgggccctcgtggagccttcagtaacgattgtgtggactcaaggccgcgggcgtaaaccgtcaatctctggaaaggacgcgttgttcgtcacgcttaccgtgttgaagcacttcgacacatggcacaagcacgctatcgacttcaacatcgccatgtcgacgctggagaagatggtgcaccgagtcatccagacggtcgaacccgtgctgtatccccagctggttaagcgggtcaagatgccaacgcagatggaggccggtaacaccttcgccaactatcctcatgcgctttacgcgaccgatgtcaagttccagccggcctatcatccacgtggtcgttttactgagcagaaggtctacttttcggcgaagcacaagctctacagcttcaagattgagtgctcggtggcactccctggcctcgcggttgacgtctccgatcactcgcctggatcctgctcggatgtgatgatgatgctggacaggctctccgtccatcgccagatgctgcgcaaggacgacacgtcggcccctgagcttggagctgtgccgacgcagttcccggaaatgtgggcagtgctcgtggacaaggggtaccaaggtgctgggcgcgtgcttcgtactgtccagccaaagaagaagccgcgcggaggaactctggaccgggtagacctcgctcggaacaaggccgtttcatcggatcgagtgctcgtggagaacttcttcggcagaatgtgcatgctgtggaaggctacctacgcgacgttcaagtggaatgagaaccggttcgactgcgtcgctcgactgtgcaccgcgctaaccaactttcacgtcggtctaatgccgctacgcgctcgtgacagcgagcattacgacatggtgctcgccacgtaccagtctatgggtgaccgcattcggacggaacgggctagggcccagcgccattaccgcatgcgccagcgactgcgctcccttacagcacacggtcttccggttctcagcgcgagacttagtacgagtcggaggagtcggtttcgttctctttctaagggctgctttgagctacgttagacttgcttctacttggtatgcgaaaagaaatagaactctttgagacttgctgtttgccctactttacttgcctatgaactagtatgcggactaaccaacttgccaccgaatgaatgtaatcaagctccgtgcagctagaaaggattaggctgcaactccaaagcggtaagaaccacggaagtcacaaatgccagttgcccactaataccacaccacgcgccctcttaaactccacaatgcacgacaggggttagagtgtgacgaacgcagtacttcggcccgccacccccatggcttggtgtcaaattggaaagtgaggtgaagcctgctcgctgtttcagtgggtgtgctatcgacaacttgatttttagcacgattaccattttcagtaacagttgatattgaagcacagcaacacatgcgtcgtttcgtggatatgataactgaacccctaaaaatcaatttttgagccacaaatgtagccaactgtttttcataggttcgtacttattacggacactcactcgctggtgtgatatttgtggcgagattcaaatctattagaaacaacaggtgtattgcgacatagcttcatctgctttctgaaaaagtcttgccctgagaaaaaaacgcctatgtttgcattttcataagtttcttgtgaaactgattatcatacgctaggtcagacgttttgcatctgttatctattggtaaaatacatactaattcggaatgctaatgggctattagcattccaccaatcgccgctctcaaatcgagccatgaggggaatccaaagaccacgggcgggaatctcgagataatcgttgtgagcgcgggaatctggcccggtatgtctgcactcctcattattcaactcgctctgcttctcacaagtcccatggtgaccaccgcatccagaccgttccagaggcgcctacgtctaaccactgctgatctgccaccgtcgccgcgaaggtcggtgctctcaaagccattgagtggtgtgctgaagcatggtgtgatctgtcggccaagcccatcgagaactgctggctgcactctactctggtcgcgaagaccgacatgaactacatactgcagtaaatcagtgcatttgcagcttgcatgtgacgcgtcaaacctttaatgctcaatatacctgcttctttccatgtatatcaggtgttcctaatcgagacactttactgtaccagataagcagcttcttagtgcaataacccactcgcgatgatatcaatttacagagagtagcggcaataagaaagggtcaacaacttataattctgacaacacataaatattgaattatacagggcctctatttaggtactgagtttgtcaaagtgatgtggcatacacacagcagtcgaagttcccgcgcctttttcaaactccaaggacagaggcacagtggctccgagcacacgcagtggctaaaccactgccgtcacacttactttctcgccgccattgccccgcaaactgccgctaaggaagaccatgagcgcctgcagtttaaagcggaggtgttgtccaacgtgcacatgttgggtttgcacaagctcagcgagctgacacacactgtaatgggccccagttacataagtaggtagattgacagtacatatagtagttaagtcagtacacggctagagtgtactgacggtcatcgtgattggctgaattgggggagtcagaccccatttcagccaatcaggcgttgacctgcatttgagcggctcacacgagaccaggggtagccgccctggtcctaacataaaacagagttgattttacccaagtctgactgctttgtctcattaaatccgagtcttaactaagcttcctcactgctacgtgtaagctagtaacggacacacacctgacccgttacacctggtaacacttagtagtccttccaacgaccaagaccaagatgagccaagtcctgacgtccggaccttcaggggcaaccctggagcatggtgccttcccccatctcacgcggattgagtgggaagctctccaccgcctcgaggcggtgtccggagaggctgttgtcacctcgctgctgagctcagtgatgccggaacaacagcgccaagctgcccaagaatttatggaacgcgagctcgccgacgcgaatcggcgggttacaactccctcgcgctcctcgaggaacgacgtcgtcaaactggagacatcgacatactccggtgtgggtgacgaccggcttccgctgaaccgctggttccgcgagatcgacatcgctatcgcctcgcgcatgattgaagcgccggcggccaaggtcaacttcctactctcccggctgtccgggaaggccaaggagtgggccctcggcaagctcgtcgtcgaccagcacgcgttccgcaccttggatgcgctccagagtgacctccggctcgcgttcgagccgccccaagacgagtcgcgcgttcgtgctgagttcttcgccctcaaacaaggcaagatgtccatgcgcgactacgtccagaagacacgacaccttgcgtcgtgcattgtcacccaccccattgacatggcatctcaggtgcatgtctttgtgttcgggatgcgcgaaggcatgacgcggtactgtctcacgagagtcgaaccctcctcgctcgaggaggcattcgccctcgcgctccgcgaggactacgtggtggcggcatcgtacgcgcgcgctatgccagacgtctctcgggtatccgcacccgagcccatggagatcaacgcaattgaggcgtcgggtgattgacggcgctcggcttatggtgggggaggaggtcggagcgctcgtcctctgacttgcttccgctgccggaagattggacatcgcgcagcagagtgccgcgcgccagccccagttctcgcgcacgtcggtgccgacgctagcccggccgcccaaccaaaagacggccgggaccagtaggtgcggggcgccctactggttggaacgaagatccgggtcctccggtggcaacccggccttctagccctctcgtgctatatgcacgttttaatgacaccactacgagtggcgactcgaggctgatcatcgtcagcctccatgtcgccggcgcccgacgtccactgcacgcgctcctcgactcaggagcgacaaacaacttcttccgcgcgtcgtgtctgtcggtgcttcctgcgagcgttcgcgtccggaagggtccgggcgaggtggaagtcaagcttgcggatggcaaggcccaccgcgtcgcgcgacgcaaggtgtccctgccgtacacgttcgacggcttccgcagcaacgacgacttcctggtgatcgagatggattacgcgttcgactgcattctgggggatcccgtggcttgcacggtatcacccagagattgactagctggctcggtcagtcaagcgtcgacgtggcttcgacgtacgtgaagtgttcacgcatctcttggtggctccaagagactggcctcacgttaccatcgtggacaagacagccacgacgcaagttgtgcacagagcgaatgatggccctctctgcatggcatgtgccgtgctgttggatgatgatgatgatgtccggatgacatcacgtggacgcgatgacggacgcgtggtcgagcgacgtgcgctcccacacagtaagaacaagtcggcggtcgagcatggggtcccgtcgagcaacgagtcgacggacgagcgtgggttcccgtcgcacaatgagacggcggtcgagcgtgggttcccgtcgcacaatgagacggcggtcgagcgtggattcccgccacaagttgagcaggcggtcgagcatgagtcgctcccgcacaacgatgttgcgtctgggagcgtggtgcagccgcgtaccgccggtgtgatcgattgtggcctctcacacctagaggagggtgaatcatcgtcgagcgagagcaatgcgtcttcttcgagcacccgctcgaagcgaaagaagaagtccaagcgacgccgcctgaagccccgtcgagaaccgtcagcgactaaggacccactgaaggagtcggtgtgcgctctcgagtacgtggagggcgctccacgacgatcgcgcgtcatcgaagtcgcgagtccgcctcgcgatgccaacacaatcacgcgtctcccaggactctcctggaagaacttcctgcgagacctgaagacaggcgagatcgagcaagtgtgtctgatcaccgaggcggtcccggtggatacgctgcacgcggtcaaggtcgaggatgcgccgacgaggcccaagcacaccgagcccaagacagcgcgcgagaagcgcttcgcaacgcagtcctgggtagctctgcgtgagtccggtaaccccgtgtacgaaactgcccgcgagtacgcggacatcttccccgacaagatccccgctgagctcccggcggaccgaggcgtgcgccacgagatcgacctcgcgcctgggacgaagtactgcgtgacgcggtagtggccacttccacgtgaccaggtgaaggcaatcgacgacttctccgagagccgccgccgggcaggccacgtgcgcgaaagcatctcgccacactccagcccgaccttttgcgtcaacaaggcaacgggcgggtggcgcattgttcacgcgttcaacaagttgaacgatgccaccatacccgcatacccgcgcagacgccaatcccgcgcaaggacatggtgctggactctatggcgggaagcgtgatctacagcgccatcgatctgaccgatgggttctaccaaatacccatgcgagagtgtgacatacctctcacagcggtaagcactccgagcagcatgctctgggagtggctggtgatgccccaaggtctgaagaacgcgccggccacgtttaaccgcatggtctcccatgtgctgcgcccgctccgtgacttcgcaccgagctacttcgatgatatcttcgtgcacagtcgcgccgaaggtgaccttagcgctgtcgaagtccacctgaagcacctgcggcaagtcttccaggtgatgagggagaacaagctctacaccaacttgaagaagtgcgtgttctgtgcaccggagatcgctgctacgtgagcaaggacggagtccgcgccaaccctgagaaggttgagtcaatctgctcttggccgacccccacgagtcccactgagcttcgtcagtggctgggcatggcgaactacttgcacaagtacaccaaggactacacgaagttaatccagccactgtcgtcgctgctgaagaaggacaccacgtggtcgtggcgagaagagcaccaagccgcatttgactcggtgaagaggggtctgtcatccgcccctgttttgatgctcgcggacgattcgaagccattccacgtcgtctgcgacgcgagcgactttgccatcgggtgcgccctgatgcagttcgacgacgagggtcgtgagcgggtgatcagctaccagtcccgccagctcaagccggcggataggaactacccagtgcacgacaaggagctcctcaccatgcgctacgcattggtcaagttcagggtctacctgctcggagagcagacgtttgcggtctacagtgtagactctacactgaccacgcatcgctgcgaactgcgatgaaatccccgcatctgtcccagcgcatcgcccgctggctgtctttcttctccgagtacaacttcatggtgcactacaagcctggcaagaacaatatcctcgccgacgcgctgtctcggcgtccagactacgacccacgtgaaggcctcgagcgccaggcagctgacgaagacgatgaagacgcgtgtgcgacgtgtgtgacgtcggggttgaacctgacgagcgtcgcccccaagatgccgcttcgggacgagatcgccgcagcgtacgagcatgacgcgcagtacgccagcatcctggcccacctccgctctccaagcgaggcgacattgaaggctctgtcgcgctcgacccgccgccacgtcgagcgatatcgacttgatggctccctgctgacgtacaccatcgaccgattcgatgccccgagagtggtggtgccgaatgacgaagaccttcgcgcccggatcatccatgagtaccacgacgctctgatcgggggtcacttgggacgcgaaaagaccttcgcggcggtggcgcgatagttcttctgaccccacttgtacaagtgggtgcgcaagtgggtgcgcacttgcgagatctgccagcgagtatagccctcgccgtcatcgcaggctccgctgcgtccccttccggtccccacggaagcctggcgcttcttctcgatggacttcatcttcggtcttccaccgactcgaacgggcgcacgggagtcctcgttttcgtcgacaggttcagcaagatggtggatctcgttcccgtggctgctacggttactgcggaagagtccgcagcccacttcgtcgacgccgtcttccgccttcatggtctgcccgactccatcgtctcggatcgggatccgaggttcacgtccgcgttttagactgagctgttcaagttgcttggaacgaagctggcgatgtccccgcggctcatccggagacggatggacaaaccgaacgcgtcaaccgcgtcgtcgaagacgtgctccgcagctacgccacgtcgtttccgagctggagcgctttcctgcccctgaccgagttcgctctgaacaacgccgagcactcgtcgacgggcatgactccattcttcgtgaactccgcgcgccacccgcgtgtacccgctatgcatgctatgggccaacccacggcggctcgtgcctctacgcttggtgggggaggacctgccgctgaagactcaccgccgaccaagacgacggcagagtcgtcgccggtcgaatcaccagcgccgccacgcttaccagtgaccgaatcaagcgcggatgcagcgacacgatcccaagtgaagaaggccctgactgcacctcgcagtgcggtgacaccgctcgcagactggacggagcgcactctgatcgaccccgctggcgctccagcgacaaagcagcaaccggctattcccgctaactacgcaccgaagtcctcggcgggtcccgcagaccactccgcggtctccgagtttgtgcagcagcgtcaggcaatcacacgtttcgtgcgggacgcactgcaagctgaagtggacaagcataacgaaaatgcagacaagcgtgggcgcaaaaacaaaaattcatttcgcacgggtgtgcggtggagtccctcagaaaaaaactaataaactcccacacgtgtcctgccacgcaactacgggggggggggttacccctgcaagccaaatacccaaagacaacgagaactagtcccgagatctctaggcctcaccttgtgtacccttgtagcaagactcggatctttatctagcgtaattcctagaagacgtgtaatatgaaggggtggatatggggttccttacactcgcaggcagagacttaggttaactctgtcgcggatgcacttgtacagcgaggtaactcttctcactgtacgacaacttgttgtacaatatgtacgagatctactggagatctcctgccgcagctagtctgcgggtccaaaccaaagtgcgagacgcacaccaataccttactaaaccgtttagagtgtcctactgtcgaacactgagagctgatctcctgagtccagacaatgcaacacactacgttactagaaggttaccggggaggccaaatcaatccagaaccccgagtacactccgcaagtaggtaggaaacagtcacagtacacacgtaggcgctaaccgcacaacacaaagactaatatgaagaagtaccttgtctcgtcgttggaaattctgaactgaactgcctatctaccggcggctcatctgccggccaaccaaccaaccggtatgctgcacgcctttacctcatgacgtcatctgctgtctccatgcgatgtcatcgtccttgttacgggcctccccgttctggatctccgtaaatacgccatcgggtttcgtaatcagtcgccggccttctatacgggacgccgagctagggtgtcccacaattcaagtagctcactctcgggtcaccttcgggtaacctccgggtccatcgcctcacaatccttcaacccgcattacgacaggtgaccatgtgctactgtctaccgaaggcatccgctcctccgccgtgaccaacctcggtgccaacaagctcgcgccgcgcttcatcggcccgttcaagatgatcaaggttctcggcgacgcgtacacactggacatcccgtcgtcgctgcgtcttcacccgaattctacgtcgggcgcctcaagcgatatcatcctgccgatattccgacctctgatcaccaggattcactggcgggtaatgtacccgacgctactcgcgacgccaacacccatcacccaagcctgtaccgtcgcgatggccctcctccgattgtcgactcggcgggtgaagcgcgctggattgtggaccgcatcgctcaccacgaggacccatgtcgtgcaaacgggcgtgggcgtaatccagtccgagctcctcgtgcgatcccagccgcgcgacgttaccgagtacgctggcttgggtttccacctgacgaggacacgtgggagacgcgtgcacctcttcttcgggatgtccccgatgttgttcgtgactatgaggcgaaggtcgctgctgctgacgagaccacggagctccccgcggaagctgaagccttaagtgagcgtgatgatggagctcgcggtggcgttcatcgcgaagactaagaagaaaatccgacgacgaccgccggactcgaaccggtgacctccgccttggtggcgcagcgttcgaccactgcgctagctaggcttcgagtcccctcgacgacgctctcggcctggtcaagtttggagcgactgcgcgtggcaagtggcaaaaaggattcgcgtgaggcttgaacccacgcgtcacagctcagctcggtgagcgcttgcccactacgccgcaccaccgatggtcgcaggtgtcgaaggtgtccaagctggtctcgctgccacgtcggttcgggtcgacggttacgcgaccctttgtcggggttacttcgaagggtcgtctcgaagagtcgcgccacgctgatcgccatcctgtgtctcgacactcaccgggtctccgctccgtgggcatcacagttgcgcttgtcgtcaagcgttggtgtcgctccacatgctgcgtcgtttccacgtccaccgtcccttcgggtgtccagggatgtccgcagccacttggggcactgcgcattgcatcggcgtgtgcgccgacgagatgtcttggtgtgtgcacacttgctgcacctgcgtcgtcctgtgtcaatcggtagcgcgagcgccgttcctccgccgcctcggtcgtccatggtgttcttcgggtgttctttcggaaatgtgtcttttgcgcttacgttgcgtaagcgcaactttgagaggggggggtgatgtaatgggccccagttacataagtaggtagagtgacagtacataaagtagttaagtcagtacacggctagcgtgtactgacggtcatcgtgattggctgaattgggggagccagaccccagttcagccaatcagacgttgacctgcatttgagcggctcacacgagaccaggggtagccgtcctggtcctaacataaaacagagttgattttacccaagtctgactgttggtctcattaaatccgagtcttaactaagcttcctcactgctacgtgtaagctagtaacggacacacacctggcccgttacacacaccgccgatacgtattgtagctacagtaatatgcggaggccgtggacaagcagggcgtcgtggtgactcacagccagtgcacttgaagatcgtgcgcctcaggaagacgagtacgacgacgataccagtgcctgtagcgtcgaagtcctttgtcgatcgggccaagtaataacgtacctaacctgtttcatttatttcgttgagtcaatacgtttaaagctccgtaagatttgatttgacttgattattgtatataccttcagtactttaatcgttgaaccctttcttattgccgctactctctgtactacctccactcggaaataaaaggcagtttcaaactatttccaatttcgcaagttttatatcctcctcaagaagatacctcgctaaacaaatgtgtatccgttcgcatcatttcgaagagggatgggtggagaggtcctgattcgaatctcccgcccagttcacttcgcaagttcaagggagagcaacaagctgctgcacgatcgtagagcatgaagtcaaggctcaagccccaagccgcgtgtgtgaggctcctcagtgagtacttgattgggtagactcgcgcggaacgctcgtgtgctaacggtcgtgctgtttgtgcgtatgtatgtccagcatgatcgcaggctaaggaagaccccaaggcaggaggtaagcgcgcgacatatgtcggtcaagtggagagcgcgtctagacatccagaacgcgactatgcttgtaatgggcctactactacggcttacgcgtatgcgcacgtgtatgaggaagcgtaggtttcttttacttgagttaagtatactcgagatccacgagtatattttaaacaagataaagaccccaagtagcgtgttttggtaaaagatgagaactgctatttgtgttttatgtttctgacttcctctaaatgtaatattctaaactaggaatctgccaacggctggagggcagaactatgcatgtcactcattggctaaaagatgctgctctcaaccaataggaatcctaagtctctatggaccacccgtcgtggtgatcctaaatgtatgtagcctttggtgtgtctacaccaaggacgagaaagtctttcgaacctctaacagacgccgtgtctgttagagttacaagtgacagtagccacttgtgcgtgtaaccccgttacaatgctactgtagtgaacgcgcttgccaggctgagcatcgagtagatcctggcgaccccctataagaatgaagctctgctcacagtcctacaaacatgctggaggcggaacaagtacgctgggcagcaggcggtgggccatgtacttcgcagttgatctgcttgtctcttcagcccggcgaattgcggtgcctggatgtggcggcctttaatgcggcattgaatgcggtggcctcgatgcgcacctcggcttgactctcgttacctattctgattcaaaaattggtcgtgctctaattttgctctctttgcacagcttataattcacaaaaaacgaggcggagctatgcgcaatttttttttgaaactgcccttattttccgaacggaggtagtactttcatacctcagcgctgttaataatcaaatacaagaaagctattagctgcaacagcgccctgccaagcacttaccttcgtgctgtaacttcgtcctggtgttgcgtcttcgggtcgggtgtgagaatgggaaatggttcgaatgaaacttgatgatgcgattgatgcttcctcaccgatagagaccgactagataattatttaatttcaatatatgatggatacttaaacaggtgcgatacacgcacggcttcatgcgacaccgatttaatcctgtaccggctgcgtagcagcataccttacggtacacatgctatctcagtaaaaaatgtgatggtattcgcgagttataactgtgcaacttagtaatagatattacatgtacagacgatcctctttgtagtgatactattactataaaaagtggccgaggctagcctcggataaaaagtggtctcccgaggctatcacagtgatagcctcgggagactactttttatcactatacagaggactcactatctagatctgtaccatattggcggtacattatcgttcaaggtactaaagagtagtgataatgcgtacagtaatgtgcgtgaataccgaacgcctgatatagttgtatcttaacttgttcatgagcctcatcttgaagagccttcttcttcaagtgaattaactgagctgacactcatacttctggattgagcatcagatgctacgtccgctaaactatcttctaacgaaaaaactcgatcagtcgtcgctgttgcaggtgcgggtgactctacccccgccgtgttcgtagaaaatgtaactgattcaacggtcttatttggcgggatagtagcgtctgtctgagcgcatgaagtcgatcgtgtcggaaccatggtaaggtgattactctgaagtgccgtcgctaagtccgcaggcgagtgccaacgcgcgagtgtcctacccacttcaacatcaagcacccaacttcaacaaaagtgcatagtttacgaatgaaaaagtggccactcgataattaattttgataccacatttgtatttgctactatgcacattgagcgactcgagtattcacttttagcgtgccaactagccactatgaagtggctagtcaataattcgccctgggttggcgtttgagtttttggctagctacttgttgcgtctcgactagccactagtagctagttttcatgcaacgagtggctagtcggaaccttagtcacaaaagtggctagtcgaaaattataatgtggctagttgaaaaatcgcacccattactctgaacatcagcgctccataatgcgtcctttattgagggttgctggtcttgggtactgtgtaccagttgtacccattaaccggttaacccgaaccggtccaatccgaacccacgttgattatggtgattacggtaagttgtttacgccaccgatgattatacgagtaggatgattggatgaacaccggtgagtgatggttgattagatgcactaggtgataggacgcagggtcgcgtgtctataacagtagggtgtaagctccaacaattcaatcactttcgaatcttcattctacccctcaagtgccttcgctccggtcccgccgtctgcgacgtccctccctccgcttcgtccgagcttcgtgtccaagatccataccttccatcaggttatgagcccaagcaccatgtcctctgcccaagacgcctcgaccaaggtctccattgacaagttcaacggggacaactacgcgacgtggaaccgctacatgcgtggcgtgttcctgaccaagtcgacgtggcatgtcgtgaaccgcgagacgacgccgagcttcacggactcgcgggccaaggacgactacgtcaagtcgagcaacatcgcgttcggactgatgttgctccacatggacgcggactaccaccatgtggtcgacgactgcgaggaagcgtgggttgcgtggacgcgcctgaagacgctgtacggtggttcgcagaaggctggacgcatctacctgaagcgccaactcttcagcatggagatgtcggaaggcggcaacgtcttgcatcattgcaacgaggtcctcaactattgagggttgctggtcttgggtactgtgtaccagttgtacccattaaccggttaacccgaaccggtccaatccgaacccacgttgattatggtgattacggtaagttgtttacgccaccgatgattatacgagtaggatgattggatgaacaccggtgagtgatggttgattagatgcactaggtgataggacgcagggtcgcgtgtctataacagtagggtgtaagctccaacaattcaatcactttcgaatcttcattctacccctcaagtgccttcgctccggtcccgccgtctgcgacgtccctccctccgcttcgtccgagcttcgtgtccaagatccataccttccatcaggttatgagcccaagcaccatgtcctctgcccaagacgcctcgaccaaggtctccattgacaagttcaacggggacaactacgcgacgtggaaccgctacatgcgtggcgtgttcctgaccaagtcgacgtggcatgtcgtgaaccgcgagacgacgccgagcttcacggactcgcgggccaaggacgactacgtcaagtcgagcaacatcgcgttcggactgatgttgctccacatggacgcggactaccaccatgtggtcgacgactgcgaggaagcgtgggttgcgtggacgcgcctgaagacgctgtacggtggttcgcagaaggctggacgcatctacctgaagcgccaactcttcagcatggagatgtcggaaggcggcaacgtcttgcatcattgcaacgaggtcctcaatgtcagcgccaagctcagcagcatcggcgccaagatggaggatgaggacgtggcgatctgcctgttgcgcagcctccccaagagctacgagaacgtcgtgctgaacttggagatgagcaacgctgaactacgatcgcaagacgtcgtgaaggtgctgacgaatgagcacatcaagagacaaggcgagaagacggcgacggtgaagacggagaatgcggccaaggcgttcaacaccgaccgagagtctcgccagtgtacgtactgcgggaaattggggcacacgattgacaagtgctggaccaagcagaaggacgagaatcggggcccaagacgcggcggcaatggcaatggccgtggacgcggggccaacaatgcccagtggaggaacgacgacgccagctacaactacgactacggctatgatcgagtggcgttcgcggtctcactggagtgtggcatttcgacgggcaagaatgtgtccgggttgtgggcggtcgacagcggcgcaacgcaccacatctgcaacgacaaggccaagttcgctcatttgattgagcggaatgaaggcgaactttcggtggccgacggcaacaaggcggccatcatgggtgtggggaccatcgtggaacgagtggttctgcccaacggcgacgagcgcgacatcgagatcaagaacgcgctgtacgtcccaagcatgagcaagaatctgctttcggtgccacagatcaacaagagtggtctgttccaagtcgtgttcgacagcaccaagatgcagattgcgcacaagggctccaagcaagtggtggcgacggcaaacctcgtggatggactctactggctccagacgcctcagcgatcggcgaatgcggcgaccagtgggaagacggtcgacttacacgcgcgtatgggtcacgctccggtggaggtgcttcgcaagatggtcgacaacaacatcatcaaggacgcgaaggcaccttccaagtcgagtggaccaagcgtgtgtcgcggctgccagcaagggaaaatggtccagaagccgttcccaagcaaccgtgacaagcgtcactacgacacgttcgagctgctccacttcgacgtgtgcggccccatggaagaagagtcactgggtggcagcaagtatctgctgctgatcgtggacgaagccagcggatgcatgaaggggttctgcctgcgtgccaagtcggagagcgaggactgcatcaagatgtacgtcacgaaggtgcagacgcagttcggcaagaaggtcaagtttgtgcggcacgacggagcccgtgagttcgcgaccaactcgctcaaggccttctacgaagtcgaaggcatcgagcagcaaaccacggttccgtacgcgcaccaggccaacggcacggcagaacgcgccatccggaccatcgtcacgattggccgcagcatgctgcatcatgccaagctggacaagagcttctgggctgaggcggccatgacagccatctacgtgaagaatcgtctgccatcacccaagatcgaacacaagactccgttcgagatcgtttacaagtccaagccgagtgtgaagcacatgcgtgtgttcggatgccagacgtacatcctgacgccgaaggaaagacggcgcaagtgggaccccaaggctcgcgccgggctgttcctcggctacgaagaagtgtccaaggcgtatcgagtttatgacatcgaggcggggcaggtggttatcagtcgcgatgtcaacttcgatgagtcgacctttggactttcgacgcatacttcggatgaagacgtcgatgatgctgtgctggacttggacgcgctggacctggacgacaacgatggaccgcgccaaacgagcttcaagcaggcggggaagcgcaagtaccgaccgagtggcgacgacaacacaatccagaagatcgcgccccgttcgccaccgagctggcttagaagaagcaagtgcgccggacgtatcctcctcgcgccgagccgaccccgacgaagaagaaaagtctggggaccaagatgaagacgacgactcgacgcctccagtgttttggcgtgccagtgccaacgctgtggaagcagcagccgatctatcggagccgacgacgttccaagaggctgtgaacggtcctgatcaagtgcactggcgcaaagcgatccgcgcggagctcaagtcgatgcgactgcgtggtgtgtttcgagctgccaagttgcctaacggacaacgcgccatcgataccaagtgggtgttcaagatcaagcgcaaagcggacggctcgatcgagaagtacaaggcgcgcctcgtggccaagggcttcaagcagaagtacggcattgactacaccgagacgttctcgcccgtggtcaagtatgtgacgctgcgcatggtgatcgcgattgctaagtattttggctggcccctcgaccaactcgacgtggtgacagcattcctgtacgggataatgaaggaggtggtcttctgcgtggttccggaaggcgtcgaactggatggtgacttcgactgcctggaactggtgaaggccatctacggtctcaagcaagcttcgcgagtgtggaacgagaccttcgacgagttcgtgtgctccatcggcttccaagtgtcggccttcgatccgtgcctctacatcaaggtagtggacggtcactgcgtgcttgtactggtgtacgtggatgacgtactgactaccgggagttcgcccgagctgatcgcacgcacgaagaccgacctgaagacgcgcttcgagatgaccgacagcggcaagtgcgcgtttgttcttgggatcgagttggtggaaggcccgaacggcagcgtgaccatgtgtcagcggcgatacgtggacgacatcctgaagcacttcgccatggacgagtgcaaggccgtggtgagtccggtggacatgagcactcgactggttccaagcgacgcggcgaccaaggtgaacgctccgtttcgcgaagctgttggtgctctgatgcacctgatgaccgccacgcgcccagacatcgcgtacgccgttggctatgtatcgcgcttcatggagaacccccaagaggaacactgggttgcggtcaagcgtatctttcgctacctgcaaggcaccaagacgcatgggatctgcttcaagccgggcgacaagatcgactttcgtggctactcggacgcggactgggccggcgacctcgccgaccgcaagtccacttcaggctacacgttcatgctcatgagtgcgcctgtgagctggggaagcaagaagcaatgaagcggagtacatcgcgctcagtctggctatccaagaaggcaagtggattcatcgcctgctatgcgagattctggcggccgctaatgagactggacccgaactcatgatccgcgaagacaaccagtcgtgcatcaagatgacgaagaacccagtgaaccacggtcgcgccaagcacatcgacatcaagtaccaccacatccgcgatgaagtcaagcgcggcgaagtcaagctccagtactgcaaaacttctgtgatgctagcggacatcatgacgaaggcgcttgcgggaccacgccacacggatctgacggtggctctcggcattcgtgggacttcgcattgagggggcgtattgagggttgctggtcttgggtactgtgtaccagttgtacccattaaccggttaacccgaaccggtccaatccgaacccacgttgattatggtgattacggtaagttgtttacgccaccgatgattatacgagtaggatgattggatgaacaccggtgagtgatggttgattagatgcactaggtgataggacgcagggtcgcgtgtctataacagtagggtgtaagctccaacaattcaatcactttcgaatcttcattctacccctcaagtgccttcgctccggtcccgccgtctgcgacgtctctccctccgcttcgtccgagcttcgtgtccaagatccataccttccatcatccttgcgtccttatatcgctcctccagcccaggggcggacctacatacaaattagggggggggcggtgcccccccccagattttggaagacaacacacttacccccgtatttctgagctgtcggatcgacatactcccctatttttgagccgcatatagacttaccccctgtttttggcccggcccccctcagatttttattctgggtccgcccctgcctccaggtgattgtgaacgcttatatccttttcagtttctctaagtagtgctttacgctttgcttcgcgctcacttcacgattggaatgatgcgtgcatgttgctctctataatattgacatgacatttgcctgaacataacttaatttaattgagctcttttgcgccgggtgattttcttgatttacgattcttattatgatcaatttcatcgatcattaccctaccttccatttcagatggcttagcatcgatagctgagtgatacgtattattgtagttattgtgagaaccggcttaaacgcccatctttagcaaccctttattagatttcaaccactaaataaaccagactacaaatcagggctgaaatcgatcgtgatctagatgcatcgcttggctgcgcgatcgcctcgtaaaaggtgggcattctgctcgaagcgtgggtatatcgacctggcttccataaaacgatcgcttaatctgtacatccactgacatatgcatcgcagaacgcgatcgatttattgtgaaagccgattagaatgtcttatcgcattgttaatccgtcgatttagtggcttaataagaccgacgacccccgatttgataaatccgacctcctaattagactgggatacctcgatttatactcaagattataatctaggacgacttgcagagtcagagcataggagtcggatttacatttgctattataatcggccgattaagccagagcccgctgatttgcttgctattcagacggaatgtccgatgtgcgaccggcattcgctctgtggagtagcggcctcacagaaatcgcggagttcgtcctcgcacaaacccgacgcgtccaatctgcggtcgcgacgggcaatttcccgaatcttgagtagcgtatcttcgaatatagagcccaagtcttcgcaagcttcagagttggggggttgagtggacgcttgttccttgtcttagggcgtcggttgttccttgggcgtgcggacttatcgggccggcgtttcctggggcttgttgcgtggcgttatcgggccgacgcggggtcttgtgcacagcggttatcaggccgtgcggtccttcgtctaggctgcgcgttatcgagcgcctcctaaccggtatacgttttacgtgccttcgtttccaacacggggtttgagggggtgagtgcccgagccaacgagcgacggggggccgcgtgttccttgcggctctgcttgccgacgcttggtggttttcaagaacctggcgatcttccggaggggagagatctgagtggttcagagaaatttcgggactgaatccttaccctatcctatgccctcactactggctattccccactactgctcgctaagcctatcgctccgtgcctatccttacttctgtcgtgcttgcactaccgtccttcaacctgatttacgtagcataatcaagacttgggcttgacggggtttctcgacgggatttcctcgacggggtttagggtcggcggggttcgcatagccgggcgtgcgaaccggctcgtcgaatcagtcaggatccgcctgattccgcagctggtctacgtgtcacacggtccatcaccccgtcaacctccctggcgatctcgacgcgtcgtattccgtccgcctcgtcggctgccatcactctcggtcactcgttccctggcgcgcgacatctcgtggggcgctattccacatccgtcccgctaccacgctcgcgcactccccaagtgggtgtgccgtcgcagaactcgctccgcgtctgtcgcgccccgtcctactgaagcttctccagtcgccgtgtatcgccgtcgttccttccaagtccatggttcgccgcgacgacgtacgcgctgccgacatagaggtggtcgacgacgagctcgataccgaagacctcgaggcagccggctgcgtcgtctgcgcgagtggagcgcaccgtcctcatcctcccgcgcgtcttcccgtcacgcttccagcacctggcacgccagttccttcggtggcggctctcgtagccgacgcgcgcgccctcgcccaggagaatcgaacgcttcgggctcagtatgagcttgtgtcagtgaacaatgccggcttggccgcccacgcctccgtgctacacgatcggaacctcgctctccttcgccatgcccgcgaaggctatcgggcgggtatggtgatgctcgagcaggcgcgcttgtcctgcgagcgcactgagcgggccaactccgagctcgaagaccgcgtgcttggcctccgtgacatggcgggccgtacggctgccgccgagacacaactccgggtgttcaaagcctcgtcggaagaggagtatcacaacttgcagaaccaactcgccgcctcgcaagcgcaggtagctgacatgtctgcacggctcgccgcggtccccgcggtggcggcccctgcctcgacgtctacggtctctatggcgcggctgttcaccgcgctcggtgagcgagacgacgcgcgtgctgagcgcgacgacctgcgcactcggctggccgctgcggaagctgccctcgtctccgtctcgacgcggccatggcggggcgaggtcgagctcgccagtccgccgtccgtcgagagcggcagcgtgacgtcaccctcgccgagcgtgaccaagcgcgtcgggacttcgcggcgctcgagcaggagcgcgacgcagtcatcgtggagcgcgatcaggctcgataggtgtccctcgctctggagcaaactcgtggcgctgcaacccgtgagcgcgaccaggcacgtcaagctcaggcgagagctgaacagcagcacgatgctctggtcgaggatctccgcgtcactcgcaactcacttgctcagagacgggctgaaaccgagtctacccagcggatgaacgacccgttgcaagccgacgtccggcgtgtgaatgcgttgctggttgcccacgccgaggagctccagcgcgagacggctcgcatacgcgaattggagacgacagccgcgactgcctcgacggcacgcgtggtcgcagaagcgaagacagcccgggcccaggctaatgagctgcaagctgtctcgcgatccgggcagtatcgcaccggctggttagccatgcggcgtcggttgctgcagcagagcgatgcgaccggcgcacacatccgccgtctgagcgtccgcgtcgccgacctggctgacgaacgcgatctagcggtccgggagcgggacgagcgtgcgatggcctggagacgcatgctccgagacgcgcgtcggagccgagagtttgcacagcgcgtgcgcgacgacctggccggcaaactggccagctccgtttcatcggtaggcggtaccatcgacaccgccggcctgatccaccgcctcgaggctacctacgcagcggaagtgaacgctggcgtcccccttcctcccgccgatcccgccggggcccccagctgttgtcgccgggccgtccgcgttagcccccgactctggcaccgtgccttcgtcaagtgattcgactcagcagccgtcgtcctctgtcggtactccggctcctcttcaggttccggtgtcttcctcagctccatcattatcgggcacacgtcggcctcgacccagtggagccaggccttcgggctctcggcacccttcttcgagctgcgcagggctcccggcgacctccacgtcgagttcttcgccacggcgtcggagccagcgggcttctacaagggctgacacagcagcctcgaacagtgcggccgcacaagtttcccctgtcacgtcgctgtcggctgcggctgcggcgcgtgctcgtgcagacgcgtctctcttcggttcagagtcctcggagagtgacgccggggcgcactctcctcagccaaaacgccgtcgtttgcgaagcccttcttcccgctcgcgttcttcgccgcgttcacgttctcgatcgacttcgcgtccgcgctcccgtccggcttcggcgtcgcgttcggtgtcgccttcccgctcggcttcgcgttcatcgtcgagttcctcgtcgcgctcgtcgaatcgctccgtcggctcggcgcgttccgcggggtcggctgcttccactcattcgacccgctcgcgtcggtcagcgtcgccttcgcggtcggcacgttctcccacgcgaggtcctcccacgcgaggtcgacgatcgtctcagcctagttcggcgactcactccggcgggcctgatgactccgacggcggcgactcgtcctcgtcgtcttctgcccgctcttcgtcttccagttccgtgtccagtggctcggagggagccgcacctgtggtgccgttcttcgttccagtaatccccccggctggcacgccttcgggttggacacagcgtcgctattttccatggcccaagtccgtacgtcgtcttcggctccacaccatcacggctcacgaattgcgagcgcgcttcttgccaccgcggggttggatctgcccccgcgcgcctgttcctgaaccggcgaactcgaaccgggccttggtgacacgtgccaacgtcgacgcgttgtacgccacgcggccctggcgctacttggctcaggaagtggggtcggtgctgttcgcgtcgggcgatgccgcgttccagccgttcatgcgtcgacttcggcaccacgtcgagggctgggcacaggcgtactgggagtctactcatgagctccatgtgtctggcgctgcgtggcggtcgtggcgttcatctcggaactcccgacggtcgcacgcaggcgaccacctgaacagtctcctccagctggtggtcgacttgtttcgccgtgggctcgccgacatggacttgcttctggaccccgcggttcttcactttccaccggcgcactcacgaatcggacggtggtttccgggactccagcacacgacgctgcaggaagcgctcgacgacgttgacgcccaggagccttggcgtcgcttctaccgaacgccgctcaccgtcgcgcagatggatgccaacgtgcgttgtcgcgtgacgcgtgcccaccacgcttacctcgtgcctcgccttgcaggcaagttcatccagcaggtttgagcgtagtccgttacgttagtgtagctcgtagccgcaacttcaatgcatccctttgacaccttccctcttttctttccctttttcacatctttctatgagacggccctccgccgtcctatcttcagcaacaggctggtcctcctcacttccctcatccaatccctcgctccggccattcccagagtcgaggcttcccaccagtcctcccgtcggcagcccccctgccgacttagtcgcacccgtgggcgaccacccaccaggctccaccgcctccgcgttctcatgcgactgcatcgcctcgaaccggttgcgtcccgtgcgctggcgcaggaagtcgtacagcaacccgccgcaattcagatcgagctcgtcgacccatgtcgtgtccgggtagcccttccatttgacttcgaactcgcgtcgcgtgcgcccataccgggtagcccgcccctcgcgcacgttcacgatcttctcgacctcgaagacgtcatcctccagctcgggcgtggcttctcagctttcttccggcaagggctcctcgtcgaagtcgaagcgctcttcggccggcaccgtcagctgcgtcgtgggtcgcgacgggaattcccggacaggcttcagcttggagatgtggacgactgggtacagctggtagggcgtacccgccgtctcgaggcgcactgcgaacgcgctgaccagctcggcgacgcggaagggtccgtgccacatgtgcgcaagcttgcgcgcataccccggcttcacccgatccaggtacagccaaacttgcgagcccgtcgcgatctcatgttgcgtcgcgttttcagtttgtcgacgcgctctctcttcgacggtctctcggactaactccaacgtttgtgccctcgccaccttgtagtgtcgctgaatacgaagcctccaccgcctcgcttcggcgtcccgggtcgacgtgttcccgacggccagcgttgcttccagcgttgcttccagcgtcgaccgaggatcccagccgtgcactaagaagaacgggatttcgttccttgtcggtcgtgcgacgtgtttagcgcgaaggtaagacgctcggcgtattcgtcccagtcgcgttggtcgacatccgcaatgtacatcttgatcgctcttgtaaccgtctgcaccatgcgttctgcagcaccgttggcttggggacggtaagcgagcgtcgctcgctgtctctgacccatgagtttgctgaacgccttgaagaagtcggacatgaagcccggctcgcggtcgtggcggatagcctcgctcgcgccgaagcgcctgaacaccgcttcctcgtacgcctcggccaccgtctgccggttcgtgacgcgttcgctttgaccacgacgaaccccgtgaagaggtcgacccagactaacagctctgtgttgcctttgtaggatgccggcaacgacggaatatggtccatggcgatgacctggaacgggtacgtcgcgactatgttgcccggcgactcgccctggatggtcggccgacccttccccgtgtcgcagtcggtgcattcgccgacgtagcgctggacgcttctgaagatccctggccaatggaagtggtgcctcacgcgctggtacgtgcggccaataccctggtgtccgccttccaggctcgcgtgatagtggtggagtatatcctccctaagatctccgggatcaccagcttcatcatcacatcgcgatcctcggcggaatcatcgtttctcggctagtagtagagcagcccgccttcgccctcttcgtactgaggtgcaagcttttggcaattcttcacctcgcgccgagataggtcaccgacgtcgccgcggagatacttcttgaggttgacgatccagacctcttcgtcctgggcgacgcggatgcggtccaggcgcagtcgttgcaccaccagctcctccaggacttctggaggtcggcccctacgtgttgtcgtgcgtgcggcagccgagcgcgtcgtcacagcgaggacttgtgctgtcccgcgtcccgcgtccatggccttcccggcggggtcatccgcgtcgagattatccgcgtcgagactggctgaagccgccctctcgggactcgatgcccgtggtcggatgacttcttccaagcgattcagcgtcttctgatcttgaatctcttcggggctgtgcgtgttgcggcctccttgacgctgcagagcttgtccagccagcatgtcgggactcgcgttccagtctcgtcgttcgtggaagagttcgtggcgcggccatgcctggagtgcgtttcgcgtcttttgtcgcagcagcttcagcgctggggacttgcagtccatctcgtcccgcatctgcctgatgacaaggttggagtttccgcatacgacgagtcgggtgacgtcgtcaagctcctctagaagagaacatccgagcagcagcccgcggtattccgcctcgttggccgtgaggtccgtcgcatatcccgacgtggcgcgcacgatctcccagttcggcagctgccaaatgacggcactgtatgctccgccttctcgcttcgccttggccgatccgtcaaagctcaagacgtgcaagacctcgtcgcgcgccacgtcggggactggaatgactacaatcctggacgcccgtctccgtagggtgatttcttctagcgccgcgtcgacgaaggctcgcggggtaatgctcgcggcgagcgcgccgaggagttcttcttctcccttcatggatcggtagatttccaacttccacggcgagaggatcgcggcccactgtgacagtcgcccctgtcgtcctttggaccggaacaaccaggcgagtgtcgtgtgacgtgtcaagacgcggactggtctccctgctagcatcgtgtagcactcgtttaagacgcgcaacagggccaagatctccttttcgacgatgtcgtagttcagctcgttgggcttcaacgtaccactggtgaacttcacaggcatgtacacttcgtcgtggacctgcgtgaacacccctgagatggcccagtcgctggcgtacacgatcacgacggattctcggttcgcgccgaagtgtttcaacattggggtctcggcgagttttgccttgagcgcgtcgaaggcgcgcgtcgcgtgcgtccactgctcatgtccacggacatctggatgcgtgacgtactcgctgtcggtctccgtcagcgaatacagcgcggtagcgtacaccgcaaagtctgcaatgatccggtggtagtaattgaggctacccaagaacgattgcaggcccttgagcgtgcgcgggaactcgagcgacgtcagcgactccagattcttcggcttcgcctcgagaccgagtcctgagactcggtggcccaggtagtcgaccttggacatgccccactcgctcttctcgacaccgatggacaagtgccactgctcgcagacatccagcaagcgttcgaccttctcgcacaggtcgtcccacgacgtacccccgatgaggatgtcgtcgatgtacgacctccgtcccagaacggagtgaatacctggcttcaccggttcgccgtctccaaagacgtcccgagtgctgccatccagggacagcttcatgaacccgtagagcgcgttgtcgatcaagcgttggtaaatctgcggcgcgttgcacaggccgaacggcatacgcagccattcgtacagtcccatcggcgtgatgtaggctgagatgagccgggcccggtctgtcatggggacgacccagaagccgctcgccatgtcgagggagcagtaccacagatacttgtccaagtcttcaagcaagtcgttgacgagcggcatggggtaaatcatcaactgtgtcagcccgttgatgagcctgtagtcaatgcaaagccggatatcgacgccgttcttctttatgatcacgacaatgggcgacgcccacggcgacttcgacttctggatcatcctcgcgctcagcagccctttgatcaagtcgacgaccttccctcgaaactgcggcgggattttccggacgcgttgcgcgacgggttttgcgtcgcccacgtcgatgtcgcagacaatacccagggcggccggcggcaaggcgttgcctttgccgatcaaccacttccgtcgcttccagatgatttggcgtagccgcgtttcttgcggcttcctcgggcgggagtccagtcggcatgccgaccttcaagtcctcgttcttcacctcggcggtcagcgagaagtctggcagcactgccatctcagactcgagatcctctacgaacaggtcggacccctcgtggatgaggaccgcgtcgtcttcctcatcatcatcaggtttcgcctcgtcgaaattcggctcggcggggtttggtccgtcgagttttggctcgtcgagttttggttcggcgagttccgactccggcgattcttccatcgcagtgcttccagccacagtcggaggcatatcgggttcactttccaccgcctcctcgtccgtatccggcttgtggtcgtcgggtggcaagtctaccccccttcccttcggcgcttccgcgacagccgccaacactggggtcacggtgcgtcgcgtcccgagttgtctcggctccgggcgcaagatggctttaggcgtcgggtatgaggggcgatccgtcatcggtccgtcgagctcggctgggatccagttctcctccgcgtcgcgcgtcgcgccgtacgccagattctgccactgctggtaccgggtggagcccagtcggacgaatccacggttccgaggctggccgtcagacggcgtccaccacccaagcgtttcatgcgcgtcgagggttatcgctgcgtctccgatgttcgtgacacgcaggtacgttttatttccgactctccccttgacaaaggtagtcacccacgactctgcccgtgtcacccacaggaacggtgcgtttcgatccggcctcagcaagacttcatgcgtgtctcctggttcgagcctcacaggcgtcttgacgttgaccgggtgcatccgtgcgccgtataacggttttcgtccgatcatctggatatgcacctcgtcggggaggcacgccgtgccatccgcagtgtcgatgcgcactccagcgggcaccatgaagttcattcccaggattgcgtgttggccgaccaagtcgccgacccacaggtgcatgtagtacaccaagttcccagccaaggtaatcttgactctggttctccccaccgtgtaatatgtctcatcacgaattcccacacactcttgcgtgatctccgtgtcaatcaggcagcctacctcacgagcaaaggtggtgtccaggatggacacctcggcacctgtgtcgagcaataacacagcacggcggttgttcagctttccatgaatcttggcctgcttgtacaacttgtgcggcgcgtaatgtttccagtatccgcgtcgctctcctggttgcaagtcgatctcgtccaggggtggttcacgtgcaaactcgtcgtccgtcgtacgtcggaccgccgagattcgcggcgcgcgttcttgcgtggtacgttccgggttggattcacatgtattatcattcagggaagtcgggctctcactaaccacctctcacgacttcttggtcacatatccatagccggaaacatgtcgctcgtctcgtactggtttccaagccagcgagcgtcctagtttaacatcttctcggcggccggcggcagcattcccgcgtgtttattcgggtcaaaccactgacgcaattggttgaagaactcctccatcgggcattctccggcttcgtgcacgtcaccgcaggccttgcacaccctcaagcatcgctccgtcgggtgttggccaccacacttctgacacgtcaacaactttcagcacatagcgacgtgaaccacagtggcggcaccgcgggcggtcgcgtcccgagtcgtcgggatcgaagttgcgacgcgccggctctcccggcggggcctgtcccgcgacgaacaacttggcgcgttcttcgtcctccccgtcttgatcgtactggcgatcgtcgctgtcgcgactctcgcgttccgagtcgtactcgtccgacgcaacgtgaatcgcatgcacggcgcgcgccggctgagtcggcggggtcggagccttttggcggaacttgttcgagccgaagagagtcttcttctggtgagccaatccacgttgtcgggcacgcagcttcttctccagcgcctcggagtcggcgacctccatcagcgtgagacgcgaggcgagttcggcctcctgcgtgttcagcgtccggatgaaatgctcgacgtgttcgcgcttctcttcagtcgtgccctcggcgtatgggatgttggccctcaagcccgccacgttgagccggtacaagtaatccagaggggtcttgtcggggcgctgagccgcatggtagtagcgactggccattgacacgcccttggcgcagtactgcacccggaattgctccatcagcccggtccatgatttcttgaccttcctgggcaactggagataccattggcgcgcagggccgctcattagatcgctgaactgcccgcacacttcttcgcccgtcatcccgtcgcgccgcgcggcggacttcagacggttgagccacagtctggctttctcttcgctggcgtaccgtcccgagaactctttcagctcggaagatgctgagaggcgtacgcgggcgagggctacgccaccggctgtcaccgtcgagacggcggccgcggttcttggcactccgatgtccaagtcgaacaggtcatcggggtcctcgtccgcgtcgcgtcgagttctggacctcgtcgaggaacgcaaactgaccgactccatggcgacatccgctgcctcctggaccgtgggtgtgggatccgcgggcggcttcggccccgtcggaattgcggccgtgtcggcgcgcggggtgttcatcactgtcgtctgcatcagcttgatgatagattctctcaaggccttgggaagcacctcctcggcgggtttcgtcacctctgtgcgtgcgggcgccgcggatagctgcatgacgcgcggcggccggttcatgggcatgcgcttgggcgactcgaaactgctgtcggagtccacgctcgattggtatcgaggtggaggcgagggcgtggtcgtcgaagtctgggctggacccgccgaggggctcggcgcgtcttggcccgtcgcggaactcgtcgcgtcttgtttgacagatccggcgagaatcgccaagggctcctgcacgacgcgaatcgcacgtaaccaagatttgaggtcccaatcgcacagcctctccatctcgaaagcccccagcacgaaccccgagtcacgcagcatctggaagagagtcggcgcggcgtgggcaacgctggtgagactatcgaagtccggcgccacgaaggggcctgtgaagttgctcatcagcatgggcttgaggaagaccaagatcgggtcttgctccagcagccggaagagctcagtgcgtgccacgacgtaccgcacctcttcgacggtgtactggcgccccgcgtccttgccttgcggcttagacagcgacgcttccgccgagtccggcgcgcgcagcttcttcttcttcctcctcttgggcgacttgcgcttggcggtggccttggcggtgagttgttgttggtcgtcggcctttgcaggcttccgaccagtaggaccgcgacgtatgtcgcggctccctcgtcgggagccacatcgggaacggcaaactgttcttcgtagccctcctggtcgtcgctggccccgtggcctgtcgtgaaggttccctcagagctccacgacgcgacaggtctctcactgtgctctcttgcggtcggcgaccttccagccgactgcgcatctgcctccgatgcctcttggatcgttagcccgtcattcgaagtagtactcccgggtcgcggtaccattgtggagtagcgccctcgcagaaatctctcgaatgcgatctcgcacaaactcggcgcgtctggatagcggtcgcgccgagcaaattattcccggttgttggagtagcgtatcttcgaaatacaggcccaagtcttcgcaggcttcggagttgggggttcttgtgttgacgctttttccttgtcgtagggcgtcgagccttgggcgtgcggcgttatcgggccggcgtttcctcggcgttcccgtcgggcgtgcggcgttatcgggccggcgtttcctgggggttgtgtggcgttatcgggcctacacgggggtcttgtgcacggcggttatcaggccagcgcggtccttcgcctaggcagcgcgttatcgggcgcccacctaaacggtatacgtttaacgtgcctttgttccagcacgggtctgtggggggtgagcacccgaaccagcaaacgacggggggccgcgatatcgaggcggctctacttgccggcgcttggtggttcccctggaacctcggagaagacgggaggtctttgtggttcagagaaatttcgggactgagtccttatcctatcctatgcccccagctactgcctactccgtactactgcttcctaagcctatcgttgtgtgcctatccctacttctgtcgtgcttgcactgccgtccttcaacctgatttgcgtggcgcactcaagatcttacctcggcgcgttttggtcggcggggtttagggtcggcgcgttttgctcagcgcgttttgctcggcgcgttttgctcggcggggtttagggtcggcgcgttttgcagaaccgggtgcgctggtcgacccgtcggatgattacgcgtcgcactggattctggcaccgtgtctcacggaccatcacccacgccgactttcccgtcgagctcggccctgcgtcgcgcccatcaatccgcgtcgcgttccatcagccgcgtcgaagtccatcactcgcgtcccggcgccttcttcctccggcgcccggcgcgcccacttcttccgcggggtactacaccagactgccctcgcctcgacgcgaggcccccacgctggtgagcgtctaggcgtcctcggttcttcgactccatggctcctccgtcgcgtgcgctcgccgacgcggctgccgctgctcttcgggctctccagtgctccggaccggtacgttcgtcgctcctgctgctcctcactgtcattgggatccttgttgttgactccatctctttcttgatcatctcagggagctgttgatgtcgccaccgacacttcgggtcgtcctccggcgcaccaggctcgtttggcgggtgccaccgcccctaccgtcgctggtgctgtgcctccagccccggccgcgcctgcaggtgaccctacggtccttccagccgcctccgggaccttggtcgaccctccaccggctcctccaagtaatcctgagtctgatgctggggcgaccgagacacccccgccggcagttcccattgaagaggctcccgactcgccgccgacaccaccgccaagcgccagcgctccaccgtcgccaactcccgcgccttcggtcacgttggcaactcgcggggcgtcggtggggggggcgaggcagctgtaggaggtcgcgccggagctggtgctggcccggccgaggttcctccgacagcggttgtcttgggcgagcagcaggtgctggaactcgctcgtctcgtcgtgggtgttgcccgtttgcctctagctcgagtcaaccctgttctcgaccgcaacctgcaagctgccactaacgtcggtgaggtgctggccgcggctgtggcccctgtacgttccctctcgcggagtcggatgggctggtggatctccgtcgcgacaacgatcggttgcgcgaggagctcgtcgacacctaaaacaagctcgacgaggagatgcatctccgccaacgggctgactatttccttgtgacggccaactcggactgcaaccaagcgctccagaacatccaagacatgcgtaccgagctcacacacgctaatcagcagttgttggagatgaacgcggccatctcccagcacggcaacattactcggtcgttggaaggtcggacgcagaccgcggaagcagacgcagcagctgctgttcgccggaacacgcagatccatgagcgtatcaaagcaagcctcgttgtctacaacacccagttggaaaagcttcggaagcagttggccgaccgtgaccgagctgatgttatccctgcccgtatcagggcgttgacggacgagaacaacagcttgcgacgggccaactctatccttcgacggcactcggcagcctatgggctctacgtggattccttggtcttggcctcggctggcatctccgccgctgagatcgactggaatctcctcgggctgtctccactgacggtcactgtcgcgagtccgcgccgtaacaaatcctcgtccgaggaagaggaagagtccaagacggctggcgtatcgatggctgagcctaccgagggttcagctgctcccgcggcttcgcaggtggtgtctgctggtttgtctgagtccaccggggcgttcaagcgcaagcccgattcgcaagccgagtcggcctctgccgagggcacggtatctcagccttctccgcccaagcgtttcggtagaccgtcggtcgacctgagagtcagagctgcagcggccgctgggtcatccagcctcggtcagcatcgggtgaggtccctgcaccgcctccgtcgacgccacgaccctcaacgacgttccgaactagccggttggatgctcagcctcttccgtacgagcactcggacgtgccgctataccctaggttgacgggcgctactctagttcctcagccagctcggtctccacctccgcgggacgaggggtatcccgacttcgagttcggcggtgctggaagtccagacgacgtcccgcaagacgatcttgagcccggcgagattccggaagcgccggccggtacagaggaggctgaaggccccgcttccgaggctcctgctactaccaccgagtctccgcctgccgtcccggttcccgaagctgcgtcgatcgtgtcccaagccttggtcagcgttggtccgacgggcgacgcacctgccgagtctcctgatggtgacaacgagggtccgtctgcctcgagaagctcgccgtcggctcctccaacgaggactgccgctggccccggtgactcatcgcctcccgagggctcgccagaaggagggtcgtcggatggctcggagacctcggaggatcgtgcagcactcatgcgagagatgtttggctccgacgacgaaagcgaagcctcggctgcccaacggacaggtcctgcagcacctccggcacctcaggctacggcgaccgaggttcctgtggttgcccaagccgctccagctgcgctgccccaatgaccttacactcggtcgacttcggttcacgctcacgcgttaatgacagctacagtgactgccacaccgagggctggtcctgcttctatcgcccctgcgatggtcgacgcttcggacgcggcggcagggtcgcgcaagctcaacaacctggcgtcactgtttctcgaaccgggattcgtgtcacccggcggtcaagagtgttggcgtttgatccagaacgctagcgtgcctctcctttttgacgacgacttagttgctccgtgttcggcggacggaatcaaggccttcggcaagtaggagaacctcgctcaccctgtccaagttctgcgccggctcatccctgatccatgcctgatcgacgtgactgggtacccgccaaatcgagcaatttctggacggctaccgggcatcaacccctcgttcgcctgagcagacagttcctgtaacggggttacacgcacaagtggctacagtcacgtgtaactctaacagacacgacgtctgttagaggttcgaaagactttctcgaacttggtgtagacacaccaaaggctgcatacatttacggccaccacgggtggtccatagagacttaggattcatattggctgaaagcagcatcttttagccaatgagcgacatgcatagcattggaattctgccaaccagccgttggcagattcctatcttagaatattacatttagaggaagtcagaaacataaaacaaaaatagcagttctcattttaacccaaaaacattatttggatcgtttatttagattaatctatactcggaggcccgagtataattaactctaagttaaactaagttacgcttcctcgtacacgtgcgcacacgtgtaagctaaagtagtgagccaaagtaggcccattacacctggtagcactttgtagtccgtccaacgaccgactacctgagttcgtatgtcaccgcacgaacgcggagctgagaaccttccagaggtgcccatggaaagctccactacgcctgcaattcacgttgcacgcgctgactgtccccacctgtcggatccagagtgggaagctctccaacgactgtcaacagtcattggtgatgcggcggtagctacgatactgcgtacgcaacgccgacagagcaacacggtgttgctctgggtttcattctgaaggaacaacgcgatgttgctactactaccgcggtgccgtccgggacgacaccacgcgcgtaatcgctgaagctcaatatgagcaactatgtcggaagagagggtgaacctctcctccgttggcttgtcgaactcgacacagccattgcggctcgacatatcgtcgacccgttgtcgaaggttgcgttcgccatgtcatgtcttggtgggcgtgcaagaagttgggcgtatggacgccgactctcggaccctacgtgctttagcacgtacgagggtttcaaggaagagctcagacaagcgtttgagcccccgcaaaacgagttccggtcgagagcggagttcctcgacctgcagcagggccagcatgatgtccatgcttacgctcagggagcacggtacttggtctcgaacatcgtgaccaatccgatcgacgaggcgaccaaggtcgtcacgttcatgaagggactgagagatgggcctgtgaagacctatctcttccgtgagtacccgagtactctcgaagctgcaattactcttgcaatgcaggaggagtttagcctgcggcaggctaagctgcatgcacatctgccgaggccacagccacgcccggtagtgaggacgggaggcccagaaccaatggacctctcgaatgcaacggctgttgattatcaacagcaacaagaaagtaatgtacgatgcttccgttgcggaaggatcggtcactatgcccgagagtgcacggcacccgtgcaccgagatggtggtcgatgcggcgatgccgggcatcgtcgcggacaaacaaaaaacgctggaacccagtaggcgcggggcgccctactggtaatgcagttccgcgtgtcgaccttggacacgcgacactgaggactgcagcccccagtgagattcattctcactgcaagaaccaagatgacatgcttgaccttgtcaacctgaacgtgaactcgatgagagcaagcggctctctccgtgctttggttgattctggcgcgtcgaacaactttgttcgactgcgaagtctatcaaggcttgacttcgaggaggtaattatacctcgaagtatgttggaagttcgattggcaacgggtgccatcgttaaaaccgagaagcgcatggtacgcgtgcgcttcatgtacgaagatcaacagtttttcgagacctttatcgtcctggatctggacgataagtttgacattgtattgggcatgctgggcaagccacggcatgatccggtcatcgattgggagaagccactctcgtgcgcttcggtcgcgacagcggaacagtgagcggtggccctgttgccgctacgcacgcaccgacaggtgcgcgcgactccccactcgaggcagcgtctaataccgctgtcccggagcaccctgtgcgcgcgcgagcacgcgcgcaagagcagctagcgtcggcgttgccgccgacagctaatgaaggaaatgtgttgacctcggaggtcgacacccgcttttcagcgaatcagaaagagtctcaggtctcaagtggcacggatgacacaggcgagtcacacgccccagccgtggaggctgacgcgaatctgattggatcagttttggccaataataagacccaaggtgacgaaacgccgtcgactccgggagtcgatagcttggacgaatttgattcgtcggctcggggagccgacgcaccctacgcaatggggtctccgccaatggttggcgtcgaggtactaaagtcgcgacggttccgggaaccggcgctgcgaaaagaagtttcgcgtcgactctgggagtcgacgcaccctttgtaacgaagggctccgccaataacaggcgtcgaggtgaagatggcggtcggctccgggagccgacgctgcaggcggtgcggacggttgcaaacgtcccgcaccggaaaaacttgcatgctgtcgtgcagccgactgcacgacaaagcgccgggcgaccaagccggacttgaagtcgctcgcccgcgggataaacccgccggctgtaccgaagaagaacacccgtccacggttgggcctggacgaggtcaagaaccaagcggagccgggctccgcaaaacaagaagacggcgcatgcgaaggtcgctgcgcaagtctcggtctggggccgagacgctacaagaaatgtctgccgggcagacggaggctgagaagccggacgtcgagacgttgaacgtcttgacgcgtacctgtgccgggttccggtacagggagatgactctcgctaatcctccgccgcaagcgtcggagttgacttcgcttccagtcatgagctggaagcgcttcgtgcgtgacttgcacgatggacgcatcgagcaaatatgcattctctcggacgccgagagaacgaagagcgagaatgaagaactgaggcagttcttcatgaagaccaccactgagagtgaggacactctcagtgcgaagactaatgtcgtataggaaaacacgatttaacgagtcttcgtccctctagccaaggcttttgggacgagcccttccaacaacacgcttctctcctaaaagttcggcgcttattgttgggattaaatctgaaggccagatctgatcccttacaccgggctggattgtgccttgtgcgagtcgtcggtcaggtaggtagagcccgtaaatcaaatataagagcgcccttagccacgagctacggctaggatgcaatctacacacgcgatttcacgcttaacccactgtggcccctcagaaggaagggtaccaggccaatcgaggcctcgaacaggggcgccggggcgaagcctcggctggaagtcaaatatactggggggccacgccacacacccagacaaatgtacaactgtaccgggaggtctctaatacctcaaacactcggccaccactcactcttggcccttccagggatgaacactcggtcaatgtaccttatgctcaccggcagacataccccgcgtcggccgagcgtatccagactctacagctaagctaagacttaccggtagacggacttgacccttgtgtggcttcggggggaaatttcgctctgatttagtgattagaggctgtgaggccttccctataactaatccctaatgtctatacaaatatcaagtatcatccgaatcgtcgagccggaccgacaactcgacgactcctcggctgggtccggattcctaatgagaggcaaatcttgtacccactatgactacctggagggctcggcggggatttattatgacccgccgtgcctggtcactaaatggctatccatctgtcgctctagtgcggggaatgagagtaaccaaccagagtgctcggctggccgtcactcgaaggttcaagaccgttagtcctcggcgcgggccgttctcggtcatttcccgatatcacagcagccctcaccgaagcccgacccagcccaactggagagtgtcgtggtgcacgccgtctctgccttcgcgcaagctgccgccctccgtgccgtcggctctgattcctcggtaagtccatatccttggtgaagtatctgttcgtcatcgcgccgcagcttccgtcgctaaccttcttcctcttgccatgtgcagccgcctgctgcgccacactcatctgctagcgggagaggctcttccgcgcctccacccgagggctcggcgtcttctctcgagggctcggcggtgccaacttccgcctctgcttcggcaagcgtggtaccccgcgcaacgcctgtggctgctcaagcgcccggcgttcctggcgcgtctccgtcgccaactcccgttgcagctggtgctggcggggcgtcggatgagcgccaggactcggtcgaggtcgatactgcccgtgtctctgttgactccggtctctccgagccttcgatgtcgagcccccgtgagcggtcgtcaccaactcccaggaagccggtggaaggtggacgtggggtgtcggctcgctcagaggtaggtgctccatcttctcctcctcagtctccgtcgagtgtgcggtccgatgactcggtcgaccctgtgtctggcccaacgcggttttgccgattaatatacacggaagcccacgagcccgcttcgcccgagccctcgtcgtcggctcctggtgacgcccctgagtcctcgcctcgcgcgccgatcccttggtcgcttgaggcagcactcgaggacctgatcgacgcaagcgtcgctcgcaccgtgcgccgctccgagtctcggttggaggatcatctggaccaacggttggcagacctcggccagctcatgatcggcctcgttcggttcccgccgctgcgagtcgactacgacctcgaccagcgtttggctgatgcccgaagtctcagcgatgtcttccgagcagtctcgccagacgccttgccgcgttccctcggcttggatgaagaggttgaagccctacgccaggaggtccgtcgtctcgaggaagccgcagttcgtagtgagcgcaggctcaacaacgagaacgacattcgtctccgcacggagcagctgtgtacccaggcgtcggctgagcgagggcagttggctacggttgcccaggcccttcgcgatgagcgggattccattagccgacaactcgctacggccaaccgagctctcgctcagagcgttgaggtgatcgatcacctgaaggcccaagtttcgaagcgcgactcttcgctgacgagccttcacgccgtcatcaagaaggatcgtcagagctttcgtgaagggctgtctcgctactctgacaccctgaagaagttccatgcgtatctccagcagtcgaacgatcaacgcttcatcctggcgaaccttgacctaggcgatgactcgctgctgcctcccgtactcaaggagttcctccgagacttcgcctccatggatttcgaactctcggtggcgacggccccgctgaagcgtccgcgtgaggcctcacccggcggctgtccgcccgtctcccaagtccaaggcccggaaccagacgagtcctgactcagatcgagacgaggacttcggggacgtcggcctcttctcggagagctcggacgatgacgaacctttgtgccatcgtcgaagagtcggaagaagctgactgggtcgactcctacaaccgtcgcgtcgtccgctgtccctcggaagcccgctccttcaaatctgaagtctcagcacggccgtccctcaaagcctcctgtaaagaggagcgcatccacgcttcggcgtcctactggcagtcggccactacgtcttcctgctgcttcggcaacgtcggcggagcaggcaactgcttcgagccgaacgcttgcctcatcggcagccatctctgaggtcggcaccgaggcgtcggttccccgccctctggtcgcgccgtcgtctccgcacccttcggacgcctccacctcgtcgttgcccgggtcgccggatcgtctgtccaattcgtctgcagtaccctcagaccgggcacggggagcagaggacgtcgggaactcttcggtgctgactacgactcaccttacgaggcttcggttgttattcagcctcgcaaggatgcgttcggcgcccactgtggcttctctccagtccaaggtcgcggtggagagtgagaacgcccctgacgacgtggtcctgggtctcgacgagccgtcggttcggcgccctgtcgaggtagatctcactcgcgaaggggagagttcggacccggtagcaactcgcactcctgcgtcttcgcgtggtggatcgagtcgcaaccccaagaaggtgtcagctaaaggagctaagatacagctccgtcagcgttcacaagctcgggcccttcctgttgctccagtcgcaccggcttcacgtccgagggttgaacctgtgcagccgagggctggtcccgttccagtccgtcagactactgttcaagcccgccgtgctgaggcctcgtctcgcccggctgcgtcgactgctcgccgcgaccagcttcatcgccgcggtaactatgacgggtcactcctgtcgcctccgttcgcgagtcctggagcaaaggagtgctggcgagagatcctggaaactcgaaccgtcccgcctgtccaacgtctgcccaagtcgagtgttcggttgacgggatccaagttttcagcgactggacgaatcctgatcaccccttctggcggttcattgagagtctcccagccgagccttgcttgttcgacgtgaccgacttccttccggacgttcctatctccattcgtgcgacgggagtcgcgttgctcacgaagctgtggcgtcagttttgttgccgagcagtcggttcaaccgagagtcacgatctggcttttgcgttgtacgagcgtgcgcactgggcgtctccggtggcagtagagcgatggctcgaccgtatgtgtcgaagactcggagaggattccgaagagtacctagccatccaggagacgtggctccagtactcggctgagcgcaacgctcggtccgatcgcctccgcattcagatcaagcgctggtgggcccaactgctgcccgatgcggatgggaaattcggctacacccccgaggtattattcgagccctcggtcctgcactattccctcgaaacgctctcgtggcttccgtcttcggcagattgggttgaggcagtcgttgaagctgatggccacgagccttggcgtaactgctggattgctgtgccaagcattcacccctacaacaccaggttcgcaccatgcaaccctggggcgatgctctttattcctcgcgggttcactctccaggaagtggcgtctgccgttatcgtcagtccggtgctcgaggtctcggctccgtgggtccgggagtacacccactaccacggcgttcctgctcctgctgaggagcttctcgatgaaagttcggttcaagcagctacggacgggcaagaggtagcggggaatgacccacggccggatgactctccaaacggggcgccgactcttcgttcgcccgagcgctcggacgatgctgcttctcctgagccgagcctcgttccgatacctccggctggatctgacgagcccgtcctcagttctggagacgaggacaaccagatcgagggctcggttgaggagtcgacatctccgccgggactccagcgcccggccgctggctctggccacctccaagtgctcgctcacgccgcttccgcgtcgaagccataggctcgctttctcctcttcgtttcttctgcccggcctgaacgtagtcttctcgatgcattgtagtgtttctcagtctgtgggcgtcgtcagatttctaatttcaaattcaaacagcatctccatgcctccacttgagtagttcgtaggatccatccgagagttcgtgcaatatgcatacatgtagtaaatgttgctgcagtagttcttttcgtctgctgaggcgggctgcatcgccccgccggcagttcatcatgttgcgccagtcgcatctagtgctcgtctgcgacttggaccgtctgcaaacgacgatcgctgcgcttagcgcgcaagtaatcgtacagcatccctccgcacgacaggttggacgcgggctcccacgtgggttcatcataaccaacccatttcacttggaactctctgaccgcgcgttcagtgcccgtcgagagcggcgttcgatcatccagaatagcctccacctcgtactcaccagtgaggtggtccgattcaaagctgtcttcgggtagaagctcttcatcgaagtctagtctcgtctcatccgtgacgtcagttaccaaccgagtcttcggtcggtctccaaactcgttcaatttctttagtcgagatatggacgactgggtagaatctatacccactccggtctggtagagccagctcatacgcgtactcgtccaccttcttcttgattcttaaggggccatgccagcgatgcgccaacttcttcgtcagccccggtttcacacgctccatgtagatccaggcacgatcacccggctcaatgagcgacttcgaggtttcggtcgacgagtcatcggtcgggtccatcgtttcagtgttttcacctgaaggttcggttcggtcagacgtcggtagagattctcgttcgcgtcgactcagggtctcgttgtgcttctcggctcgtttggctttctctgtcgcccggtactctttggccatctccaaagcgatctcctgttgccgattgacttctcgtctccaagccaaggcgtcggtttggcgaccgcggcctcgtttcagtgacgaagacatagctcgaagtgtcgtccgcgcatcccagccgtgtacaaggtagaacggcgtgtccttgcgcgtggcgtcctccgagttgttgatagcaaagatcagcttctccacgatctcatcccagtcctgttgcagcgggtcttccgcgtacactcgaacggactgtatgacattcttaaccgagcgttcctgctggccgttggcttgtgaccgatagatcagggtggcccgagacctcgattgcatcatttccgtaaatgcttggaagacttcgcccatgaagcgagggtctctgtcatgtcggaggagggtagtgtcgtatagggaaaacacgatttaacgagtcctcgtccctctagccaaggcttttgggacgagccctaccaacaacacgcttccctcctaaaagttcggcgcttattgttgggattaaatctgaaggccagatccgatcccttacaccgggctggattgtgccttgtgcgagtcgtcggtcaggtaggtagagcccgtaaatcaaatataagagcgcccttagccacgagctacggctaggatgcaatctacacacgcgctttcacgcttaacccactgtggtccctcagaaggaagggtaccaggccaatcgaggcctcggacaggggcgccggggcgaagcctcggctggaagtcaaatatactggggggccacgccacacacccagacaaacgtacaaccgtaccgggaggtctctgatacctcaaacactcggccaccactcactcttggcccttccagggatgaacactcggtcaatgtaccttatgctcaccggcagacataccccgcgtcggccgagcgtatccagactctacagctaagctaagacttaccggtagacggacttgacccttgtgtggcttcggggggaaattctaaggtgcctggccagtttagcgcaaatttgcgaagtgtcgccgcagtacagcgatatctcgctgtagactggggtgatttgagcacgaagaccacctaccgaaagctcattattaggactatctcgtctatttatacggcttctagcaggcgatttaacgaattggtggctcgttaggcagagcacaccgaaaggccgcccgtccagtttaccgcagccaaacatatagaattttgtagcggtgcccatcaccctttgcccatttcagtactgatttcggaatttctaccaatggtgtggccaataccatctccactggatgaaattggacaaaaatcccatttcttttaagaacgcatagcaggctacagtagtggctgctattcgcagccactggttgccttgggtagcctcagtttgcagatgcccggaagacgcttaagctacacagacacacaaattaacaccgccgtggcccaagttctcgagggtgcctctatctcgcaagtgagcaagacgagtggcgtgcgctatcggacactagcaagttcagtagccgcagcaaaacgtggcgagttccgcgtccgcggcccagcgcctctgctaccagccgaagctgagatcaatctctatgagtgggttcttggccgccagcaggtccttcgccctgtgaccagttcacaaggcaagcacaaatccaacctactgttccagagaggtctcggtgacggctggtacaagcgattcatgcagcggttccctctgctttcgacgcgcacagctcaggccatttcaaaggcacggaacagcgtcacgtcagatgacgtaacgttgttccacacgacgttagcagacgcctatgagaaatacggattcgaagcgtgcatagtcttcaacatggacgagacaagcttcgcgtcgaagaagaacaccaagaccgtggttgcagctcgcgggtcccgcaacgtctggacggccgaggtatcaaccagctttcatcttacaatcgtagcctgtggtggagcggatggcaccgcaattccaccagcttttattctaccaggccaaactgtcatcctcaacgtcctgggcttttgcaccgtgcccagagcagccgtctcgacgacagaatccggcttcatgaacgcggatgtggtgtagggaacatcaagatttgtgtcacactccaaggccgcagtggaacaacgtaccaggagccaagttctactcggcgggatgaccgtccgccgagctcagtgggcaagaatgcgctgatggaccgctgaactcggctgatggtgtcagaaactcaagccacaccggccccgacctggtgacacgtggcagacccagtgatgaagacccagccgagttcaggaaggcactggacaggctcatccgagatcatggggggggggtcaagccgccgagctcaggctgaacggtaccatgtaccgtccgatacggtaaccaggctcaattgagtccgggagttgcgcagtcgagttcacgggtcgctctgccgagttcacgagtcgctccgccgagttcacgagtcgctccgccgagttcactgggttatccggcaccttatccggctcaaccgagttcgccaggttatccggacacgccgtatccggctcagccgagttcaaggggttacccggacaggttatccggcttagccgagctcgagcgtcgccgagctcggtgaagagtcggccgagatccaaaaccgcccactttcatttggtatttgtataggagcttaggaatagtggaggcgccccttcagggcgcccgacagagataacaaacaacagagcagaattttctaggtccacaacacgtgcacgcgcttccagtaagcccctgcacgggccggattatgtctgctgtcagcacccgagaggcatagcttgtagggtgttgactggtagcgccaagagattaaggtcggcccgggttgggcgcgtgtctcgccaagcgcgaaggaaaagtctcgccaccgctgcgagccggtgttcccgtacgtcccaggcactgattgctgagtcgagaagcctttgctctcggcgacccgtaaaagcccgcgagggccgtcgtccgtcctttggcggagggcacgggatttctaattccggagtcaggtaactcagctggcttccgtggttgactggcttggggcacttggtctcggcgaggacgagacatcactgtcccggaagggccgaaccgctgggggacatctcagcgcaggccaacaagggccgactagctcggctgttgttgtgtttgtggcttgggtgccacatctgatgattttgtgagtgctactacaccacaaatggtgacgcgacccgggagcagggtggtttgttttcgttggtaccaagtcaaccaagtttcgagtactgagcaagatggtcaaggggagatctttgccgagctgggccagcccagcgacggctgggggttcgtttcacacgaagccgaactcagctggcggaaggatcgccgacatgatgatggaagcggtcccaaccgttcggtttggcgacgaccgcacccaagaccgaggaagagatggaaatatcggagattatgatgaagaattgaagaaagctgagttgctcagcggggtagctgagttctcgctgcatgttgggcgcgtggagaaacctcgacgagcccaacaaaacctcgcagccgagctcggtgacgatgcggacgacgacagtcaagccgtcgctccaggggaccgtccgcccctgatacaacgagcgacgagggcatccagcgcgaaatgcccgagttgggattcgatgccgaacgtctcgtgggaaacctttccactcgactaggggcaatcgaagaaatgtgaaacccgtctgcaaatggtgcaagttgcagatgcggtctaaggctattgcaccaaagtgatgatccgccgactcagtgaagacagcaggctgggtcgagtcgaagaatgatactgcgtcaactgtatggattatatgaattacatgatatcgaaatggagtgagcgaagatggagctggaaagcaagaagcccattcgccgggttagcgttggagtcggcgcgaagtctcagccgagttgccgagctgagcggttaagcccagctggtctgacaacgacccagtgaagaagctgagggaggtgatggtgcgtctgcacagattgagcgagtcagccgtcgatgccgaagttgtgttgactcgtcactgggtccgtgaacacccactggggcactgtgtgtgatatgcggcggtacgatcgacacccttgggtacgaccgccgggacctccgaccaagtcgatgaacgatcttcccgttgtgcgctcaagctgaattggagcgcaggtgtgctgacgcggagctgtgctgatatggagccacgctcaagcaggaaagccgaagcgaagtcgagttcgcacgatgttccagtgaggccgtaatcactccatgtttaccgagaggcggctagccgagtcggtcgatgcgcggcggcggtgaacaaaccgaagttgcagcaaagctggagttgagcaaagctcagcggaggcacgctgggcaggcgcgtcgccgagaatgtcgacgtgccagcgatctcgaacgggagccgagttgatccgtagctgagcagaagcagacacctgctttgaagatgaactccgacttcactcgatccgacgtagggctaccatcgcgtttatctgcggtcagcctgaagccgagtcggtgaaatcgctgagtcacggcgtcgcaaaggtgtacccaacatccaaaggtggactgaagaggaatggattccacgcggccgcggtcgtattcacattgagccaacatgagcagagcttggtcaggggtcgagcatagccaagtcgaaacatcccttcaaagcgctgatacttccgctaagggacagagctggtcaggcagccagctgtgtcgttcgctcagtcgagcttgcctctcaccttgctcaactgggctaagctgaagcggaatcaattccaggtgaacatgagtcgcgctagacccgggttgattcgtggcagagccacagaacatggggatcaagtggcgcctaggcgaattgcagcagaggtttgtcttgaatccgagctgaatcgggatcaggtacaagtgcagccgaggtcagcaccaactgagttgaaccacagtcaagctgaagccgagatgcgttcaagcagagccgagttgaagcgagacagtgcactctgcgtggaagtagtttgacaccgagatgtcgtgaagccgagttcaaccaagccggaacggagccgagttcgagcaacgcttcgaagaagcgctggtcgttggagtggagtcgattgaagagcaaccttgccgaagcaaagccacgatcaagttgggccgcttcgcgtccagttccagtgggaacgcatacatctcggtcttgtgcccggttctcgtcggattccagccgagacgaactaggtcgagccgacgttatgcgcagccgagtccgagcagagctgagctgaagcgaggctgagatcacgctgcgtcctaatgtggtcgcgttcgcactgggttgctgcgacgccgagaacattggagtacgatcaagctggaatgggatgccgagttccagtagtgccacgggttggatggcgccaatctgaagtgtactcacttcaacggaaggaaacactgggctgagttgcggtacgccaagtttcagtgagatcgcgttcggaagttcgcctagttgagtgctggtaaacgcaccatgttccgattggagagcgctcatgccgagttcgaggtgtagtcgagctgaggctgaacacgcttcacagctgaaccgaagataccgaattcaaactgagtttgaacgcagccgagctcgcggcgagccgagttggaatgtgaccgaatgaagtgctgttccagtcgagcttgcccaccaccttcccaaccaagctgagcccagtcggggtaagctggtctaacagagcgggagacatgccgaagtcaaggtccgttgaccaatgaacccagctcgacaactcgactggagcatcaaacgcatcgggatcgccttgttcgtttataaaatgacacagcaacggtgagagctaactcaacgcaccaaagtgagtggggcaaacacttaccaggctagttgagtcgatgaagcggaggctgtgttcaagtccaaccgagttcaaggtcagcggatagcagctagtcgtcaggacagccgagttcggacacagctgagttcaacttgctgctgcacttctcgccaataagctcagctgggttggatttcgagctcagcgcggcccgatcggggaagcgtttcttgacccgccgagttcccggagccttgtagcatgccaagacaaccatcaggctccactcgacgcaccgaaacgagaggcacgtgcttaccgggtcagccgagtcgctggcagcatccatggctgctcattttgacggagacaacgatgctcggcttcgtcggtattgcagccaatcgagcacttccccgacacctgcatcacctactcgctttgcggcggcaggcccaacatcatcgctagtactccgagcttcgacaggggcatcagctgacttcgtatggttcagttcctgctaccggctgccacgccgagacgaccatccaggctgattcgctgctgaagtgatccgaggacggggtttggtgcgagcgataggggcatctacatgtgtacagacccatgagtcgcggacaaagcctataccaaagatcaaggctcaagcaagtctcaccttcacggaacgaggaacgagggtgtcgagctgacgttgcgggcgtttcgcgccactcgaattcgggaaatgtgaactcagagtgtttgcgacagatctgattcgacgaaatcaagcgtgcgacacatccggttggccaggccactcaccactccggctcgtagcatggccggggcagttgtggtgtagggaacatcaagatttgtgtcatactccaaggccgcagtggaacaacgtaccaggagccaagttctactcggcgggatgaccgtccgccgagctcagtgggcaagaatgcgctgatggaccgctgaactcggctgatggtgtcagaaactcaagccacaccggccccgacctggtgacacgtggcagacccagtgatgaagacccagccgagttcaggaaggcactggacaggctcatccgagatcatgggggggggggggtcaagccgccgagctcaggctaaacggtaccatgtaccgtccgatacggtaaccaggctcaattgagtccgggagttgcgcagtcgagttcacgggtcactctgccgagttcacgagtcgctccgccgagttcacgagtcgctccgccgagttcactgggttatccggcaccttatccggctcaaccgagttcgccaggttatccggacacgccgtatccggctcagccgagttcaaggggttacccggacaggttatccggcttagccgagctcgagcgtcgccgagctcggtgaagagtcggccgagatccaaaaccgcccactttcatttggtatttgtataggagcttaggaatagtggaggcgccccttcagggcgcccgacagagataacaaacaacagagcagaattttctaggtccacaacacgtgcacgcgcttccagtaagcccctgcacgggccggattatgtctgctgtcagcacccgagaggcatagcttgtagggtgttgactggtagcgccaagagattaaggtcggcccgggttgggcgcgtgtctcgccaagcgcgaaggaaaagtctcgccaccgctgcgagccggtgttcccgtacgtcccgggcactgattgctgagtcgagaagcctttgctctcggcgacccgtaaaagcccgcgagggccgtcgtccgtcctttggcggagggcacgggatttctaattccggagtcaggtaactcagctggcttccgtggttgactggcttggggcacttggtctcggcgaggacgagacatcactgtcgcggaagggccgaacggccttttcggtgtgctctgcctaacgagccaccaattcgtcttgaaatcgcctgctagaagccgtataaatagacgagatagtcctaataatgagctttcggtaggtggtcttcgtgctcaaatcaccccagtctacagcgagatatcgctgtactgcggcgacacttcgcaaatttgcgctaaactggccaggcacctgactctgacttagtgattagaggctgtgaggccttccctatagctaatccctaatgtctatacaaatatcaagtatcagccgaatcttcgagccggaccgacaactcgacgactcctcggctaggtccgaattcctaatgagaggcaaatcttgtacccactatgactacctggagggctcggcggggatttattatgacccgccgggcgtcggctgaggctcaggctgcggcggcaaagcatgcggcccagccgtcggttcaggcgtctggcaagcggccggtgtcgagcaccgcagagccttcgtcgacaactcccgctaggccgatggaaggccgacgcggggcgtcggggggctcaaatgcagctccgtcttcctttccaccgtcgcctcctgctactccaccgcacgagccttcgtcgggtccgactcgcttttgtcgatctgagtactcgtcttctggcgatcgcgtcccgcttgggacttcagaccaagactccttcggcctccaccgtcgtcccaggggctctctatttcgccctcgaagatctcgtcgacggcggtgtcaagaaggcgttgcttcagtcggaggctcgtcttgacgagcacctggaccagcggcttgcagatctcggccagctcatggtcggcctcgtccgcaatccaagtctccgtatcgacgaagacttggaccagcgccttgcggaggctcggagcctgcgagacgtcgtccaagcggtggctccagacgcgcttccgaaaccttactgctgggacgagaagatggaagagctgcgccgtgaagtccagcgattccaggacgcggctgtggagagcaagcgcctgagcgacaaggagcaccttcttcgtctcagggctgaccgactgtgcgtcgcagcttcagccgaacgtaatcggttggacagagacctccagtcttgtcgtaaggaaagagacttcgctaaccagcggctcaacctctcggctcgagccctcgcgcagagtgaggagatgctcgatcagctgagagtccaagtcaaggcgcttgaggacgcggacaaggccacccaggcggtgatcgcacaggaccggctgacgttcaagaacggcttggtgcgatacaccaatactgtccgggacttccacgcatacctccagcatctggaagagcatcggttcacactgagtcagctcgaccttggcgacggctcaacgttgcctcaagtcctgcggacgttccttcaagagttctgttccatggagttcgcactgagggaggccacgtccggttccaagcgcgaccgtgagggttctgcgctgtctagttctcacggggaggtgtcggctccaactcactccggtccacgcctaactgctcacgctgagaactcgtcaactgcaggcgtaactctggaggaggattcggacgacgacgatccgatcatcccgtcttccaaacgtcggaggaaggtggaaggagagactgtgaaggccctatcggctcgagacgtggcatccgtagctcagaagaagaaggctcggctcgggcggccgtctcagcccctggtgaagaagattctccgagtgtccaagtctcgtccgaccgatactaagcctgcggccaagtctaaggcttccaatgctaaagaacgtgtaccggcagccgagccgtcgtctcttccagcagttgtcgacttgactctcgacctgtcggcagtgcccaggtcgagtcttggcgagtcgtctgctgttcgtccgtcttctccgcatccctcggacgcgtcgacttcgtcaatgcccgggtcgccgactcgttcgccagaagcgtcagtggcgtcgcctgagcacacccaagaagctgaagggtcagacgccgagcaggagctcgtggtcctggactacgactcgccgtacaaggcgtcggtcgtgattcagcctcgcaaggatgggcgtcctgtgcgccctgcatcaactgtagcttcactacagtccaaggtcacggttgagagcgaaaaggcgccagatgacgccgtgcttgggttgcagaaggcttcagtcctgccaccagcggagattgacctgactggggcagacacggatcaacagtctgggagtcgagttgtccaaggctcgtccaagggcaagtccaagcttacggctgttccaagtggcaagccgaagcagcggatgaaggtctcggctaaggtgacgaagacgcagctcaaccagcttcctaaggcttccgctgctgctccgaagactgggctggttccggttcctgaatcaaaggctctgtcgcgtcccgaccaagcagctgtcgcgaccaagcgcgcgcaggcgtcggaccacgtgatccctgagactctgagtttggaggggactctcttgtcggcaccattcgcgtctcctggagcagagctctgctggaagaagatactggagactcggtccgggcctcccgtccctaacagtactctgattgagtgctcggttgacggcatcaaggcattcgctgactggaccaaccccaatcacccgcaccaagagttcttggcgcagcttcctgagtggccgtgtctgttcgacgcttcggattacatgcctgacgtcgtcatctcgattcgcgcaagcgtcgaagagctggcagtcaagctctggcgccagttttgcagccgcgcattcggggcgaccgagaactccgacctcggttttgctctctacgaacgtgatcactggatcgcccccgctgctgtggatcgatggctccggcgtctcggccgaaaactcggtaagacccaccctgtgtactgttgtcaagactgatgtgacgacgcctcgccaagcgaccgtgtcacgcgaacgcgtcatcagtgaggttggcgtgaccttcactgtgttgtaccgcaatcattcaggtgattacgggacgatgattacgtcacggtgattacgccatgattgtgggtacatgattgtgggtacaagatgggcatcgacgtggcgttctctgattggataaggtaactgtgtatccagtagagaatccagtagggtgtatccagtaagaggtatccagtagcaggcttagaggtagcacgcggttgcgaactaaggacctgaatcgaatcactttgcattttgccaactactgctcaagtgctcttccttttggttatgagcccaagccccgtcttccctgaccaagaccccgactacgccttcgccatggacgccgccccgaccgcgaccgcccgcatcaacaagttcgacggaaccaacttccacacatggaagttcaagatgcagatggtgctggaggagcgcgaattgtgggaagtgacgggtggggaagtgaagctcgagcagtgcacgaccgcggcggaccaagcgacgtttcgcaagaagtcgcgcaaggcgctggcgatcgtctgtctcgcgttggaggactcacagctgccgctggtgcggtcggcgaaggacgcgcatgatgcatggtcaagactcgagggacacttcgagaagaagagcctggcgaacaagctctttcttcgtcgacgattcttcacgacaacgatggacgaaggtgatgatgtgctggagcacattaacaagctcaagacgctggcggaacagctcgacgcggtcggcgctccggtcagcgaggacgacttggtgatcacgcttcttgccagtctgagcgagtcgtaccagttcctcatcacggcgttggaatcgcgttccgacacgctgacgtgggagctcgtgacgtctcggctcctgcacgaggacatgaagcgcaaggaacaaggtggcggtgctgacggaaccgcgcacgctcaaggtcaagcgttcatgacaagcgacaacgggaagcgcaagggacggcaggcgcaagcgcagaggacgagcgcctgtcactactgcggcgagcacggacattggatcgccaagtgtccggtgcggatccgcgagaacggggagcggcagaggccgcaacgagcgaacgtcgcgcaggtcgaagatgactctggcgacttcctcttctcggttggtggcgacacggtgcctccaagctgagcggcatgtggctggtcgactcaggtgcgacgcagcacatgacgtactcgaaggagtacatggagaactacaagaagatctctccggtggacgtgcatctggcggacgacggcgtggttcaggcggtggggagcggcgacatcgtgatgtcgatgcagacaccgcgcggcatgaagaagggtgtgctcacgggtgtgtggcacatcccgaagctgtcgcgcaacctgttctccgtcggccgcttcaccaaggacgtcgggccagtgaccttcgagagcgacgggtgcttcgcggaaacgaagggtctcaagtggaagctcggcgctcgcgaaggcaaaggactgttcaagctctgcaagacgccgaggacgcctgctgacgaggccaatgcggcaagctcgaagaatcgccaaggggacaccacgtcgtacctctggcaccttcgacttggtcacatcggccatggtggtctcgacgccatcgtcaagaagggctacggcactggcatcccaatgacgtcggtgaagcagtgggaggtgtgcgacgggtgcgcactcggcaagcaaacgcgagtaagcttcatgaagtcgtcgccgaaccgtgcgaagcaagtgctggaggtggtccacagcgatgtgtgcggtccgatgcagacggcgacgttcggaggcaagcgctacttcgtcacgttcatcgacgacaagtcgcacttctgcgtggtgtacctgctacggaacaagtcggaggtggctgccaagttcgctgcgttcgtcgcgttggctgagacgcagaccggcaagcgagtgaaggtgcttcggagcgacaacggcggcgagtacacttcgggtgcgatggccaagttgtgtgcggatcgcggcatcgagcagaagttcacgccgccatacacgcctcagctcaacggagtggccgagcgaatgaatcggacgctggtggagtgtgcgcgctgcatgctggagcacgccgggttgtcgaaggagtactggggagaagcggtgatgacggccacgttcctccgcaaccggtgtccgacgcgcgccatcagtcacgacaagtcgccgcaccacgtttggaccggcaagaagcctttgctggccaaccgcaaggtgttcgggtgccacgcgtacgtgcacgtgccgaaggagaagcggtcgaagtttgacgctcggtcggtgcgctgtcgtttcctcgggtactcggagcacgagaaggcgtatcggttcgaggagatcgagagcggtcgcgtgttggtgagccgcgacgcgcagttcatggaggatgtcttcgacggtgggagacgcgactacgcttcgaaggaggtgttggtgggtcttccgacagatgatgatgaagacaccacggatgaagagcctcagtccggatcagacgagaacagagaagaagctgcgcggaatcaagactttgaacccggcagcaagcgacacccgcgcacgcagtcgctcgaggaagccgtggaggttccgagtgccaagcggtatgcggtgccgagacgacagcagccgctggacgagatgtctgccgcagcacaagagaaggaagacttcgaggctgcgtacgtcgtggattcagtgggagagatgccgacaacgttcaagtcggcgatggaatccagcgacgcagacaagtggaaagaggcgtgcgactcggaggtggagtcgctccgcaagaacgagacgtggaccctggtgccactgccgaagggacgcaaggcgatcggctgcagatgggtgttccgcgtgaaggagaaccagtctggagagatcgagcggttcaaggcgcgactggtggcgaaggggttctcccagaagtacggcatcgactacgacgagacgttcgcgccggtggccaagttcacgtcgattcgggtgttgctgagtctggcggccaagtacaagctcacagtgcaccagatggatgtgaagaccgcgttcctcaacggcttgttggatgaggacatctacatggcgcagccggacggatatgtggacggagatcgacccgactacgtgtgccggctcaagcgttcgctgtacggcctgaagcagtcgccgcggatgtggaacaagacgatcgacgagttcatgttgaagctggggttcaagaagtgcgagtccgaccactgcatctacttgaagcgggacaatcacgacatgatgttcgtggcactgtacgtggacgatctggtactcgccagcagcagcgacgggatgctgaaggacacgaagcaggcgctgagtgaccggttcgagatgactgacatgggccagctcaagtacttcctcggtatggagatcgagcaagatgtggcgactgggaaggtgtcggtgcggcagaccaagttcgcgaaggacattctcgagaagttcaagatggatgagagcaaccctgtgaagacaccgcaggatccgggtctgaagctgaccaaggccatgtgcgagggaggctgcaagcacgacgagaccatggcgaatgttccgtaccggaacgccgtgggctgcctcatgtatctcatggtggggactcgtccggacctcgcagcggcagtgggagtactgagccagttcgcagcggacccatgtccgacacactggcaggcgctcaagagggtcttccgctacatccgaggcacgaagacgcacggcctcgtgtttcaagcgagcagcgaggacggactgcaaggctactcggacgcggactgggccggcgacatcgagtctcgacggagtacgagcggctacgcgttcatggtgaacggcggatgcatcagctggcgaagcaagaagcagcgcacggtggcgctctcgtcgacggaagccgagtacatggcgctgtcggaggccacgcaggaggcggtgtggctcaaggtgtttctgtgcgagctgggcgagatggcgagcgatgaagcggtgaagatctacgaggacaaccaaggctccatcgcgttggccaagaacccggagttccacaagcgcaccaagcacatcgacattcgctaccacttcgtgcgcgagaaggtggaagacggtcaagtggtgttgcagtatgtttcgacactcgacatgctggcggacatcatgacgaagccgatcgcggcgccgcagttcgacgcgctcaggacgaagctgggcatcgtggtcgctgacgagtcgagtgggagtgttgtcaagactgatgtgacgacgcctcgccaagcgaccgtgtcacgcgaatgcgtcatcagtgaggttggcgtgaccttcactgtgttgtaccgcaatcattcaggtgattacgggacgatgattacgtcacggtgattacgccatgattgtgggtacatgattgtgggtacaagatgggcatcgacgtggcgttctctgattggataaggtaactgtgtatccagtagagaatccagtagggtgtatccagtaagaggtatccagtagcaggcttagaggtagcacgcggttgcgaactaaggacctgaatcgaatcactttgcattttgccaactactgctcaagtgctcttcctttttgtacgtggctatttgcaacgagtggcgcgcgtattccaaggatcggagcgggcgttcggatcgactccgcgttcacatcaagcgctggtggtcgcttctccttccgaactctgcaggcgacgtcgggttccactcggaggctctgctcgaacccacggcgcagtattactctctcgacactctctcgtggatcccggacacggccgattgggttcatgaggtagcggagatcgatgtgcatgagccttggtgcaacggctggatcgacgttccctcgctgcatccgtataacaccctgttcgcgccttgcaacccgggagtccctgttttcgtcccccgcggtttcactctgcaggaagtcgcgtctgaggtcgtggtcgacccttcgctagatccacaggacgtatcggcgccttgggttcgtacatacaccgactaccacggcccggcgagagctcgtgctgacggagcgatggccggcggaggcgcagtcatggaggagcaagaggaagacctcgaggagaagcgcgctccagaagacacggttgtcgaggacgcgaaccaagagatgtcggacgacgaggatgcggacgaggtcgaggaagaagaagaagacgttgtcatggaagacatcgatgaggatgcggtccaggacaagtccggcactcctgtctcgacttcgatccgtatggaagaggactctgactccgacgacgaagataatcaggtcatcgaaggcgcggtggaggattccctttccgatttcgaacgtccggctcgaggctccggtcgtctgcaagcgcccgctcgcactgcttctgcttcgaagtaatgaggccacggctgttgggtcttcgttctgtcttctctgcccagactggtccaaagtttctcgtcgtagtttagcgtaattccagtctgcaggcctaatcaatttccaattcaatcattttcaaacgtaatttccatctctccacttgagcaacttgggaaatccactcgaaagtacatgcaatatgtaaacatgcagtaatgttgatgcagtagttcttttcgtctggtgagacgggctgcatcgccccgccggcagttcatcacgttgcgccagtcgtgtctagtcctcgtcggctggttccgctgcctctgagttatcacctgagggttcggttcggtcagacgtcagcatggattcccgttcccgtcgactcagggactcattgtgcttctcggctcgcttcgctttctctgtcgcctggtactctttcgccatttccaaagcgatctcctgctgtcggttgacttctcgtctccaagcaagggcatccggttggcgaccgcggtcacgtttcaatgacgaggacatggctcaaagtgtcgtccgcgcatcccagccgtgtacgaggcaaaacggcgtgtccttgcgcgtggcgtcctgcgagttgttgatagcgaagattagcttctccacgatctcgtcccagtcttgttgtagcggatcttcagcgtacactcggacggattgtatcacggtcttaaccgagcgttcctgctggccgttggcttgtggccgatagctcagcgtagctcgggaccatcgagacaatctgcagcggtcgttcggccaagatgttaccatgagagtgatggaaggtatggatcttggacacgaagctcggacgaagcggagggagggacgtcgcagacggcgggaccggagcgaaggcacttgaggggtagaatgaagattcgaaagtgattgaattgttggagcttacaccctactgttatagacacgcgaccctgcgtcctatcacctagtgcatctaatcaaccatcactcaccggtgttcatccaatcatcctactcgtctaatcatcggtggcgtaaacaacttaccgtaatcaccataatcaacgtgggttcggattggaccggttcgggttaaccggttaatgggtacaactggtacacagtacccaagaccagcaaccctcaatacgccccctcaatgcgaagtcccacgaatgccgagagccaccgtcagatccgtgtggcgtggtcccgcaagcgccttcgtcatgatgtccgctagcatcacagaagtctcgcagtactggagcttgacttcgccgcgcttgacttcatcgcggatgtggtggtacttgatgtcgatgtgcttggcgcgaccgtggttcactgggttcttcgtcattttgatgcacgactggttgtcttcgcggatcatgagttcgggtccagtctcattagcggccgccagaatctcgcatagcaggcgatgaatccacttgccttcttggatagccagactgagcgcgatgtactccgcttcattgcttcttgcttccccagctcacaggcgcactcatgagcatgaacgtgtagcctgaagtggacttgcggtcggcgaggtcgccggcccagtccgcgtccgagtagccacgaaagtcgatcttgtcgcccggcttgaagcagatcccatgcgtcttggtgccttgcaggtagcgaaagatacgcttgaccgcaacccagtgttcctcttgggggttctccatgaagcgcgatacatagccaacggcgtacgcgatgtctgggcgcgtggcggtcatcaggtgcatcagagcaccaacagcttcgcgaaacggagcgttcaccttggtcgccgcgtcgcttggaaccagtcgagtgctcatgtccaccggactcaccacggccttgcactcgtccatggcgaagcgcttcaggatgtcgtccacgtatcgccgctggcacatggtcacgctgccgtccgggccgtccaccaactcgatcccaagaacaaacgcgcacttgccgctgtcggtcatctcgaagcgcgtcttcaggtcggttttcgtgcgtgcgatcagctcgggcgaactcccggtaatcagtacgtcatccacgtacaccagtacaagcacgcagtgaccgtccaccaccttgatgtagaggcacggatcgaaggccgacacttggaagccgatggagcacacgaactcgccgaaggtctcgttccacactcgcgaagcttgcttgagaccgtagatggccttcaccagttccaggcagtcgaagtcaccatccagttcgacgccttccggaaccacgcagaagaccacctccttcattatcccgtacaggaatgctgtcaccacgtcgagttggtcgaggggccagccaaaatacttagcaatcgcgatcaccatgcgcagcgtcacatacttgaccacgggcgagaacgtctcggtgtagtcaatgccgtacttctgcttgaagcccttggccacgaggcgcgccttgtacttctcgatcgagccgtccgctttgcgcttgatcttgaacacccacttggtatcgatggcgcgttgtccgttaggcaacttggcagctcgaaacacaccacgcagtcgcatcgacttgagctccgcgcggatcgctttgcgccagtgcacttgatcaggaccgttcacagcctcttggaacgtcgtcggctccgatagatcggctgctgcttccacagcgttggcactggcacgccaaaacactggaggcgtcgagtcgtcgtcttcatcttggtccccagacttttcttcttcatcggggtcggctcggcgcgaggaggatacgcccggcgcacttgcttcttctaagccagctcggtggcgaacggggcgcgatcttctggcagtgttgtcgtcgccactcggtcggtacttacgcttccccgcctgcttgaagctcgtttggcgcggtccatcgttgtcgtccaggtccagcgcgtccaagtctagcacagcatcatcgacgtcttcatccgaagtatgcgtcgaaagtccaaaggtcgactcatcgaagttgacatcgcgactgataaccacctgccccgcctcgatgtcataaactcgatacgccttggacacttcttcgtagccgaggaacagcccggcgcgagccttggggtcccacttgcgccgtctttccttcggcgtcaggatgtacgtttggcatccgaacacacgcatgtgcttcacactcggcttggacttgtaaacgatctcgaacggagtcttgtgttcgatcttgggtgatggcagacgattcttcacgtagatggctgtcatggccgcctcagcccagaagctcttgtccagcttggcgtgatgcagcatgctgcggccaatcgtgacgatggtccggatggcgcgttctgccgtgccgttggtctggtgcgcgtactgaaccgtggtttgctgctcgatgccttcgacttcgtagaaggccttgagcgagttggtcgcgaactcacgggctccgtcgtgccgcacaaacttgaccttcttgccgaactgcgtctgcaccttcgtgacgtacatcttgatgcagtcctcgctctccgacttggcacgcaggcagaaccccttcatgcatccgctggcttcgtccacgatcagcagcagatacttgctgccacccagtgactcttcttccatggggtcgcacacgtcgaagtggagcagctcgaacgtgtcgtagtgacgcttgtcacggttgcttgggaacggcttctggaccattttcccttgctggcagccgcgacacacgcttggtccactcgacttggaaggtgccttcgcgtccttgatcatgttgttgtcgaccatcttgcgaagcacctccaccggagcgtgacccatacgcgcgtgtaagtcgaccgtcttcccactggtcgccgcattcgccgatcgctgaggcgtctggagccagtagagtccatccacgaggtttgccgtcgccaccacttgcttggagcccttgtgcgcaatctgcatcttggtgctgtcgaacacgacttggaacagaccactcttgttgatctgtggcaccgaaagcagattcttgctcatgcttgggacgtacagcgcgttcttgatctcgatgtcgcgctcgtcgccgttgggcagaaccactcgttccacgatggtccccacacccatgatggccgccttgttgccgtcggccaccgaaagttcgccttcactccgctcaatcaaatgagcgaacttggccttgtcgttgcagatgtggtgcgttgcgccgctgtcgaccgcccacaacccggacacattcttgcccgtcgaaatgccacactccagtgagaccgcgaacgccactcgatcatagccgtaggcgtagttgtagctggcgtcgtcgttcctccactgggcattgttggccccgcgtccacggccattgccattgccgccgcgtcttgggccccgattctcgtccttctgcttggtccatcacttgtcaatcgtgtgccccaatttcccgcagtacgtacactggcgagactctcggtcggtgttgaacgccttggccgcattctccgtcttcaccgtcgccgtcttctcgccttgtctcttgatgtgctcattcgtcagcaccttcacgacgtcttgcgatcgtagttcagcgctgctcatctccaagttcagcacgacgttctcgtagctcttggggaggctgcgcaacaggcagatcgccacgtcctcatcctccatcttggcgccgatgctgctgagcttggcgctgatgttgaggacctcnnnnnnnnnnnnnnnnnnnnnnnnnnnnnnnnnnnnnnnnnnnnnnnnnnnnnnnnnnnnnnnnnnnnnnnnnnnnnnnnnnnnnnnnnnnnnnnnnnnnnnnnnnnnnnnnnnnnnnnnnnnnnnnnnnnnnnnnnnnnnnnnnnnnnnnnnnnnnnnnnnnnnnnnnnnnnnnnnnnnnnnnnnnnnnnnnnnnnnnnnnnnnnnnnnnnnnnnnnnnnnnnnnnnnnnnnnnnnnnnnnnnnnnnnnnnnnnnnnnnnnnnnnnnnnnnnnnnnnnnnnnnnnnnnnnnnnnnnnnnnnnnnnnnnnnnnnnnnnnnnnnnnnnnnnnnnnnnnnnnnnnnnnnnnnnnnnnnnnnnnnnnnnnnnnnnnnnnnnnnnnnnnnnnnnnnnnnnnnnnnnnnnnnnnnnnnnnnnnnnnnnnnnnnnnnnnnnnnnnnnnnnnnnnnnnnnnnnnnnnnnnnnnnnnnnnnnnnnnnnnnnnnnnnnnnnnnnnnnnnnnnnnnnnnnnnnnnnnnnnnnnnnnnnnnnnnnnnnnnnnnnnnnnnnnnnnnnnnnnnnnnnnnnnnnnnnnnnnnnnnnnnnnnnnnnnnnnnnnnnnnnnnnnnnnnnnnnnnnnnnnnnnnnnnnnnnnnnnnnnnnnnnnnnnnnnnnnnnnnnnnnnnnnnnnnnnnnnnnnnnnnnnnnnnnnnnnnnnnnnnnnnnnnnnnnnnnnnnnnnnnnnnnnnnnnnnnnnnnnnnnnnnnnnnnnnnnnnnnnnnnnnnnnnnnnnnnnnnnnnnnnnnnnnnnnnnnnnnnnnnnnnnnnnnnnnnnnnnnnnnnnnnnnnnnnnnnnnnnnnnnnnnnnnnnnnnnnnnnnnnnnnnnnnnnnnnnnnnnnnnnnnnnnnnnnnnnnnnnnnnnnnnnnnnnnnnnnnnnnnnnnnnnnnnnnnnnnnnnnnnnnnnnnnnnnnnnnnnnnnnnnnnnnnnnnnnnnnnnnnnnnnnnnnnnnnnnnnnnnnnnnnnnnnnnnnnnnnnnnnnnnnnnnnnnnnnnnnnnnnnnnnnnnnnnnnnnnnnnnnnnnnnnnnnnnnnnnnnnnnnnnnnnnnnnnnnnnnnnnnnnnnnnnnnnnnnnnnnnnnnnnnnnnnnnnnnnnnnnnnnnnnnnnnnnnnnnnnnnnnnnnnnnnnnnnnnnnnnnnnnnnnnnnnnnnnnnnnnnnnnnnnnnnnnnnnnnnnnnnnnnnnnnnnnnnnnnnnnnnnnnnnnnnnnnnnnnnnnnnnnnnnnnnnnnnnnnnnnnnnnnnnnnnnnnnnnnnnnnnnnnnnnnnnnnnnnnnnnnnnnnnnnnnnnnnnnnnnnnnnnnnnnnnnnnnnnnnnnnnnnnnnnnnnnnnnnnnnnnnnnnnnnnnnnnnnnnnnnnnnnnnnnnnnnnnnnnnnnnnnnnnnnnnnnnnnnnnnnnnnnnnnnnnnnnnnnnnnnnnnnnnnnnnnnnnnnnnnnnnnnnnnnnnnnnnnnnnnnnnnnnnnnnnnnnnnnnnnnnnnnnnnnnnnnnnnnnnnnnnnnnnnnnnnnnnnnnnnnnnnnnnnnnnnnnnnnnnnnnnnnnnnnnnnnnnnnnnnnnnnnnnnnnnnnnnnnnnnnnnnnnnnnnnnnnnnnnnnnnnnnnnnnnnnnnnnnnnnnnnnnnnnnnnnnnnnnnnnnnnnnnnnnnnnnnnnnnnnnnnnnnnnnnnnnnnnnnnnnnnnnnnnnnnnnnnnnnnnnnnnnnnnnnnnnnnnnnnnnnnnnnnnnnnnnnnnnnnnnnnnnnnnnnnnnnnnnnnnnnnnnnnnnnnnnnnnnnnnnnnnnnnnnnnnnnnnnnnnnnnnnnnnnnnnnnnnnnnnnnnnnnnnnnnnnnnnnnnnnnnnnnnnnnnnnnnnnnnnnnnnnnnnnnnnnnnnnnnnnnnnnnnnnnnnnnnnnnnnnnnnnnnnnnnnnnnnnnnnnnnnnnnnnnnnnnnnnnnnnnnnnnnnnnnnnnnnnnnnnnnnnnnnnnnnnnnnnnnnnnnnnnnnnnnnnnnnnnnnnnnnnnnnnnnnnnnnnnnnnnnnnnnnnnnnnnnnnnnnnnnnnnnnnnnnnnnnnnnnnnnnnnnnnnnnnnnnnnnnnnnnnnnnnnnnnnnnnnnnnnnnnnnnnnnnnnnnnnnnnnnnnnnnnnnnnnnnnnnnnnnnnnnnnnnnnnnnnnnnnnnnnnnnnnnnnnnnnnnnnnnnnnnnnnnnnnnnnnnnnnnnnnnnnnnnnnnnnnnnnnnnnnnnnnnnnnnnnnnnnnnnnnnnnnnnnnnnnnnnnnnnnnnnnnnnnnnnnnnnnnnnnnnnnnnnnnnnnnnnnnnnnnnnnnnnnnnnnnnnnnnnnnnnnnnnnnnnnnnnnnnnnnnnnnnnnnnnnnnnnnnnnnnnnnnnnnnnnnnnnnnnnnnnnnnnnnnnnnnnnnnnnnnnnnnnnnnnnnnnnnnnnnnnnnnnnnnnnnnnnnnnnnnnnnnnnnnnnnnnnnnnnnnnnnnnnnnnnnnnnnnnnnnnnnnnnnnnnnnnnnnnnnnnnnnnnnnnnnnnnnnnnnnnnnnnnnnnnnnnnnnnnnnnnnnnnnnnnnnnnnnnnnnnnnnnnnnnnnnnnnnnnnnnnnnnnnnnnnnnnnnnnnnnnnnnnnnnnnnnnnnnnnnnnnnnnnnnnnnnnnnnnnnnnnnnnnnnnnnnnnnnnnnnnnnnnnnnnnnnnnnnnnnnnnnnnnnnnnnnnnnnnnnnnnnnnnnnnnnnnnnnnnnnnnnnnnnnnnnnnnnnnnnnnnnnnnnnnnnnnnnnnnnnnnnnnnnnnnnnnnnnnnnnnnnnnnnnnnnnnnnnnnnnnnnnnnnnnnnnnnnnnnnnnnnnnnnnnnnnnnnnnnnnnnnnnnnnnnnnnnnnnnnnnnnnnnnnnnnnnnnnnnnnnnnnnnnnnnnnnnnnnnnnnnnnnnnnnnnnnnnnnnnnnnnnnnnnnnnnnnnnnnnnnnnnnnnnnnnnnnnnnnnnnnnnnnnnnnnnnnnnnnnnnnnnnnnnnnnnnnnnnnnnnnnnnnnnnnnnnnnnnnnnnnnnnnnnnnnnnnnnnnnnnnnnnnnnnnnnnnnnnnnnnnnnnnnnnnnnnnnnnnnnnnnnnnnnnnnnnnnnnnnnnnnnnnnnnnnnnnnnnnnnnnnnnnnnnnnnnnnnnnnnnnnnnnnnnnnnnnnnnnnnnnnnnnnnnnnnnnnnnnnnnnnnnnnnnnnnnnnnnnnnnnnnnnnnnnnnnnnnnnnnnnnnnnnnnnnnnnnnnnnnnnnnnnnnnnnnnnnnnnnnnnnnnnnnnnnnnnnnnnnnnnnnnnnnnnnnnnnnnnnnnnnnnnnnnnnnnnnnnnnnnnnnnnnnnnnnnnnnnnnnnnnnnnnnnnnnnnnnnnnnnnnnnnnnnnnnnnnnnnnnnnnnnnnnnnnnnnnnnnnnnnnnnnnnnnnnnnnnnnnnnnnnnnnnnnnnnnnnnnnnnnnnnnnnnnnnnnnnnnnnnnnnnnnnnnnnnnnnnnnnnnnnnnnnnnnnnnnnnnnnnnnnnnnnnnnnnnnnnnnnnnnnnnnnnnnnnnnnnnnnnnnnnnnnnnnnnnnnnnnnnnnnnnnnnnnnnnnnnnnnnnnnnnnnnnnnnnnnnnnnnnnnnnnnnnnnnnnnnnnnnnnnnnnnnnnnnnnnnnnnnnnnnnnnnnnnnnnnnnnnnnnnnnnnnnnnnnnnnnnnnnnnnnnnnnnnnnnnnnnnnnnnnnnnnnnnnnnnnnnnnnnnnnnnnnnnnnnnnnnnnnnnnnnnnnnnnnnnnnnnnnnnnnnnnnnnnnnnnnnnnnnnnnnnnnnnnnnnnnnnnnnnnnnnnnnnnnnnnnnnnnnnnnnnnnnnnnnnnnnnnnnnnnnnnnnnnnnnnnnnnnnnnnnnnnnnnnnnnnnnnnnnnnnnnnnnnnnnnnnnnnnnnnnnnnnnnnnnnnnnnnnnnnnnnnnnnnnnnnnnnnnnnnnnnnnnnnnnnnnnnnnnnnnnnnnnnnnnnnnnnnnnnnnnnnnnnnnnnnnnnnnnnnnnnnnnnnnnnnnnnnnnnnnnnnnnnnnnnnnnnnnnnnnnnnnnnnnnnnnnnnnnnnnnnnnnnnnnnnnnnnnnnnnnnnnnnnnnnnnnnnnnnnnnnnnnnnnnnnnnnnnnnnnnnnnnnnnnnnnnnnnnnnnnnnnnnnnnnnnnnnnnnnnnnnnnnnnnnnnnnnnnnnnnnnnnnnnnnnnnnnnnnnnnnnnnnnnnnnnnnnnnnnnnnnnnnnnnnnnnnnnnnnnnnnnnnnnnnnnnnnnnnnnnnnnnnnnnnnnnnnnnnnnnnnnnnnnnnnnnnnnnnnnnnnnnnnnnnnnnnnnnnnnnnnnnnnnnnnnnnnnnnnnnnnnnnnnnnnnnnnnnnnnnnnnnnnnnnnnnnnnnnnnnnnnnnnnnnnnnnnnnnnnnnnnnnnnnnnnnnnnnnnnnnnnnnnnnnnnnnnnnnnnnnnnnnnnnnnnnnnnnnnnnnnnnnnnnnnnnnnnnnnnnnnnnnnnnnnnnnnnnnnnnnnnnnnnnnnnnnnnnnnnnnnnnnnnnnnnnnnnnnnnnnnnnnnnnnnnnnnnnnnnnnnnnnnnnnnnnnnnnnnnnnnnnnnnnnnnnnnnnnnnnnnnnnnnnnnnnnnnnnnnnnnnnnnnnnnnnnnnnnnnnnnnnnnnnnnnnnnnnnnnnnnnnnnnnnnnnnnnnnnnnnnnnnnnnnnnnnnnnnnnnnnnnnnnnnnnnnnnnnnnnnnnnnnnnnnnnnnnnnnnnnnnnnnnnnnnnnnnnnnnnnnnnnnnnnnnnnnnnnnnnnnnnnnnnnnnnnnnnnnnnnnnnnnnnnnnnnnnnnnnnnnnnnnnnnnnnnnnnnnnnnnnnnnnnnnnnnnnnnnnnnnnnnnnnnnnnnnnnnnnnnnnnnnnnnnnnnnnnnnnnnnnnnnnnnnnnnnnnnnnnnnnnnnnnnnnnnnnnnnnnnnnnnnnnnnnnnnnnnnnnnnnnnnnnnnnnnnnnnnnnnnnnnnnnnnnnnnnnnnnnnnnnnnnnnnnnnnnnnnnnnnnnnnnnnnnnnnnnnnnnnnnnnnnnnnnnnnnnnnnnnnnnnnnnnnnnnnnnnnnnnnnnnnnnnnnnnnnnnnnnnnnnnnnnnnnnnnnnnnnnnnnnnnnnnnnnnnnnnnnnnnnnnnnnnnnnnnnnnnnnnnnnnnnnnnnnnnnnnnnnnnnnnnnnnnnnnnnnnnnnnnnnnnnnnnnnnnnnnnnnnnnnnnnnnnnnnnnnnnnnnnnnnnnnnnnnnnnnnnnnnnnnnnnnnnnnnnnnnnnnnnnnnnnnnnnnnnnnnnnnnnnnnnnnnnnnnnnnnnnnnnnnnnnnnnnnnnnnnnnnnnnnnnnnnnnnnnnnnnnnnnnnnnnnnnnnnnnnnnnnnnnnnnnnnnnnnnnnnnnnnnnnnnnnnnnnnnnnnnnnnnnnnnnnnnnnnnnnnnnnnnnnnnnnnnnnnnnnnnnnnnnnnnnnnnnnnnnnnnnnnnnnnnnnnnnnnnnnnnnnnnnnnnnnnnnnnnnnnnnnnnnnnnnnnnnnnnnnnnnnnnnnnnnnnnnnnnnnnnnnnnnnnnnnnnnnnnnnnnnnnnnnnnnnnnnnnnnnnnnnnnnnnnnnnnnnnnnnnnnnnnnnnnnnnnnnnnnnnnnnnnnnnnnnnnnnnnnnnnnnnnnnnnnnnnnnnnnnnnnnnnnnnnnnnnnnnnnnnnnnnnnnnnnnnnnnnnnnnnnnnnnnnnnnnnnnnnnnnnnnnnnnnnnnnnnnnnnnnnnnnnnnnnnnnnnnnnnnnnnnnnnnnnnnnnnnnnnnnnnnnnnnnnnnnnnnnnnnnnnnnnnnnnnnnnnnnnnnnnnnnnnnnnnnnnnnnnnnnnnnnnnnnnnnnnnnnnnnnnnnnnnnnnnnnnnnnnnnnnnnnnnnnnnnnnnnnnnnnnnnnnnnnnnnnnnnnnnnnnnnnnnnnnnnnnnnnnnnnnnnnnnnnnnnnnnnnnnnnnnnnnnnnnnnnnnnnnnnnnnnnnnnnnnnnnnnnnnnnnnnnnnnnnnnnnnnnnnnnnnnnnnnnnnnnnnnnnnnnnnnnnnnnnnnnnnnnnnnnnnnnnnnnnnnnnnnnnnnnnnnnnnnnnnnnnnnnnnnnnnnnnnnnnnnnnnnnnnnnnnnnnnnnnnnnnnnnnnnnnnnnnnnnnnnnnnnnnnnnnnnnnnnnnnnnnnnnnnnnnnnnnnnnnnnnnnnnnnnnnnnnnnnnnnnnnnnnnnnnnnnnnnnnnnnnnnnnnnnnnnnnnnnnnnnnnnnnnnnnnnnnnnnnnnnnnnnnnnnnnnnnnnnnnnnnnnnnnnnnnnnnnnnnnnnnnnnnnnnnnnnnnnnnnnnnnnnnnnnnnnnnnnnnnnnnnnnnnnnnnnnnnnnnnnnnnnnnnnnnnnnnnnnnnnnnnnnnnnnnnnnnnnnnnnnnnnnnnnnnnnnnnnnnnnnnnnnnnnnnnnnnnnnnnnnnnnnnnnnnnnnnnnnnnnnnnnnnnnnnnnnnnnnnnnnnnnnnnnnnnnnnnnnnnnnnnnnnnnnnnnnnnnnnnnnnnnnnnnnnnnnnnnnnnnnnnnnnnnnnnnnnnnnnnnnnnnnnnnnnnnnnnnnnnnnnnnnnnnnnnnnnnnnnnnnnnnnnnnnnnnnnnnnnnnnnnnnnnnnnnnnnnnnnnnnnnnnnnnnnnnnnnnnnnnnnnnnnnnnnnnnnnnnnnnnnnnnnnnnnnnnnnnnnnnnnnnnnnnnnnnnnnnnnnnnnnnnnnnnnnnnnnnnnnnnnnnnnnnnnnnnnnnnnnnnnnnnnnnnnnnnnnnnnnnnnnnnnnnnnnnnnnnnnnnnnnnnnnnnnnnnnnnnnnnnnnnnnnnnnnnnnnnnnnnnnnnnnnnnnnnnnnnnnnnnnnnnnnnnnnnnnnnnnnnnnnnnnnnnnnnnnnnnnnnnnnnnnnnnnnnnnnnnnnnnnnnnnnnnnnnnnnnnnnnnnnnnnnnnnnnnnnnnnnnnnnnnnnnnnnnnnnnnnnnnnnnnnnnnnnnnnnnnnnnnnnnnnnnnnnnnnnnnnnnnnnnnnnnnnnnnnnnnnnnnnnnnnnnnnnnnnnnnnnnnnnnnnnnnnnnnnnnnnnnnnnnnnnnnnnnnnnnnnnnnnnnnnnnnnnnnnnnnnnnnnnnnnnnnnnnnnnnnnnnnnnnnnnnnnnnnnnnnnnnnnnnnnnnnnnnnnnnnnnnnnnnnnnnnnnnnnnnnnnnnnnnnnnnnnnnnnnnnnnnnnnnnnnnnnnnnnnnnnnnnnnnnnnnnnnnnnnnnnnnnnnnnnnnnnnnnnnnnnnnnnnnnnnnnnnnnnnnnnnnnnnnnnnnnnnnnnnnnnnnnnnnnnnnnnnnnnnnnnnnnnnnnnnnnnnnnnnnnnnnnnnnnnnnnnnnnnnnnnnnnnnnnnnnnnnnnnnnnnnnnnnnnnnnnnnnnnnnnnnnnnnnnnnnnnnnnnnnnnnnnnnnnnnnnnnnnnnnnnnnnnnnnnnnnnnnnnnnnnnnnnnnnnnnnnnnnnnnnnnnnnnnnnnnnnnnnnnnnnnnnnnnnnnnnnnnnnnnnnnnnnnnnnnnnnnnnnnnnnnnnnnnnnnnnnnnnnnnnnnnnnnnnnnnnnnnnnnnnnnnnnnnnnnnnnnnnnnnnnnnnnnnnnnnnnnnnnnnnnnnnnnnnnnnnnnnnnnnnnnnnnnnnnnnnnnnnnnnnnnnnnnnnnnnnnnnnnnnnnnnnnnnnnnnnnnnnnnnnnnnnnnnnnnnnnnnnnnnnnnnnnnnnnnnnnnnnnnnnnnnnnnnnnnnnnnnnnnnnnnnnnnnnnnnnnnnnnnnnnnnnnnnnnnnnnnnnnnnnnnnnnnnnnnnnnnnnnnnnnnnnnnnnnnnnnnnnnnnnnnnnnnnnnnnnnnnnnnnnnnnnnnnnnnnnnnnnnnnnnnnnnnnnnnnnnnnnnnnnnnnnnnnnnnnnnnnnnnnnnnnnnnnnnnnnnnnnnnnnnnnnnnnnnnnnnnnnnnnnnnnnnnnnnnnnnnnnnnnnnnnnnnnnnnnnnnnnnnnnnnnnnnnnnnnnnnnnnnnnnnnnnnnnnnnnnnnnnnnnnnnnnnnnnnnnnnnnnnnnnnnnnnnnnnnnnnnnnnnnnnnnnnnnnnnnnnnnnnnnnnnnnnnnnnnnnnnnnnnnnnnnnnnnnnnnnnnnnnnnnnnnnnnnnnnnnnnnnnnnnnnnnnnnnnnnnnnnnnnnnnnnnnnnnnnnnnnnnnnnnnnnnnnnnnnnnnnnnnnnnnnnnnnnnnnnnnnnnnnnnnnnnnnnnnnnnnnnnnnnnnnnnnnnnnnnnnnnnnnnnnnnnnnnnnnnnnnnnnnnnnnnnnnnnnnnnnnnnnnnnnnnnnnnnnnnnnnnnnnnnnnnnnnnnnnnnnnnnnnnnnnnnnnnnnnnnnnnnnnnnnnnnnnnnnnnnnnnnnnnnnnnnnnnnnnnnnnnnnnnnnnnnnnnnnnnnnnnnnnnnnnnnnnnnnnnnnnnnnnnnnnnnnnnnnnnnnnnnnnnnnnnnnnnnnnnnnnnnnnnnnnnnnnnnnnnnnnnnnnnnnnnnnnnnnnnnnnnnnnnnnnnnnnnnnnnnnnnnnnnnnnnnnnnnnnnnnnnnnnnnnnnnnnnnnnnnnnnnnnnnnnnnnnnnnnnnnnnnnnnnnnnnnnnnnnnnnnnnnnnnnnnnnnnnnnnnnnnnnnnnnnnnnnnnnnnnnnnnnnnnnnnnnnnnnnnnnnnnnnnnnnnnnnnnnnnnnnnnnnnnnnnnnnnnnnnnnnnnnnnnnnnnnnnnnnnnnnnnnnnnnnnnnnnnnnnnnnnnnnnnnnnnnnnnnnnnnnnnnnnnnnnnnnnnnnnnnnnnnnnnnnnnnnnnnnnnnnnnnnnnnnnnnnnnnnnnnnnnnnnnnnnnnnnnnnnnnnnnnnnnnnnnnnnnnnnnnnnnnnnnnnnnnnnnnnnnnnnnnnnnnnnnnnnnnnnnnnnnnnnnnnnnnnnnnnnnnnnnnnnnnnnnnnnnnnnnnnnnnnnnnnnnnnnnnnnnnnnnnnnnnnnnnnnnnnnnnnnnnnnnnnnnnnnnnnnnnnnnnnnnnnnnnnnnnnnnnnnnnnnnnnnnnnnnnnnnnnnnnnnnnnnnnnnnnnnnnnnnnnnnnnnnnnnnnnnnnnnnnnnnnnnnnnnnnnnnnnnnnnnnnnnnnnnnnnnnnnnnnnnnnnnnnnnnnnnnnnnnnnnnnnnnnnnnnnnnnnnnnnnnnnnnnnnnnnnnnnnnnnnnnnnnnnnnnnnnnnnnnnnnnnnnnnnnnnnnnnnnnnnnnnnnnnnnnnnnnnnnnnnnnnnnnnnnnnnnnnnnnnnnnnnnnnnnnnnnnnnnnnnnnnnnnnnnnnnnnnnnnnnnnnnnnnnnnnnnnnnnnnnnnnnnnnnnnnnnnnnnnnnnnnnnnnnnnnnnnnnnnnnnnnnnnnnnnnnnnnnnnnnnnnnnnnnnnnnnnnnnnnnnnnnnnnnnnnnnnnnnnnnnnnnnnnnnnnnnnnnnnnnnnnnnnnnnnnnnnnnnnnnnnnnnnnnnnnnnnnnnnnnnnnnnnnnnnnnnnnnnnnnnnnnnnnnnnnnnnnnnnnnnnnnnnnnnnnnnnnnnnnnnnnnnnnnnnnnnnnnnnnnnnnnnnnnnnnnnnnnnnnnnnnnnnnnnnnnnnnnnnnnnnnnnnnnnnnnnnnnnnnnnnnnnnnnnnnnnnnnnnnnnnnnnnnnnnnnnnnnnnnnnnnnnnnnnnnnnnnnnnnnnnnnnnnnnnnnnnnnnnnnnnnnnnnnnnnnnnnnnnnnnnnnnnnnnnnnnnnnnnnnnnnnnnnnnnnnnnnnnnnnnnnnnnnnnnnnnnnnnnnnnnnnnnnnnnnnnnnnnnnnnnnnnnnnnnnnnnnnnnnnnnnnnnnnnnnnnnnnnnnnnnnnnnnnnnnnnnnnnnnnnnnnnnnnnnnnnnnnnnnnnnnnnnnnnnnnnnnnnnnnnnnnnnnnnnnnnnnnnnnnnnnnnnnnnnnnnnnnnnnnnnnnnnnnnnnnnnnnnnnnnnnnnnnnnnnnnnnnnnnnnnnnnnnnnnnnnnnnnnnnnnnnnnnnnnnnnnnnnnnnnnnnnnnnnnnnnnnnnnnnnnnnnnnnnnnnnnnnnnnnnnnnnnnnnnnnnnnnnnnnnnnnnnnnnnnnnnnnnnnnnnnnnnnnnnnnnnnnnnnnnnnnnnnnnnnnnnnnnnnnnnnnnnnnnnnnnnnnnnnnnnnnnnnnnnnnnnnnnnnnnnnnnnnnnnnnnnnnnnnnnnnnnnnnnnnnnnnnnnnnnnnnnnnnnnnnnnnnnnnnnnnnnnnnnnnnnnnnnnnnnnnnnnnnnnnnnnnnnnnnnnnnnnnnnnnnnnnnnnnnnnnnnnnnnnnnnnnnnnnnnnnnnnnnnnnnnnnnnnnnnnnnnnnnnnnnnnnnnnnnnnnnnnnnnnnnnnnnnnnnnnnnnnnnnnnnnnnnnnnnnnnnnnnnnnnnnnnnnnnnnnnnnnnnnnnnnnnnnnnnnnnnnnnnnnnnnnnnnnnnnnnnnnnnnnnnnnnnnnnnnnnnnnnnnnnnnnnnnnnnnnnnnnnnnnnnnnnnnnnnnnnnnnnnnnnnnnnnnnnnnnnnnnnnnnnnnnnnnnnnnnnnnnnnnnnnnnnnnnnnnnnnnnnnnnnnnnnnnnnnnnnnnnnnnnnnnnnnnnnnnnnnnnnnnnnnnnnnnnnnnnnnnnnnnnnnnnnnnnnnnnnnnnnnnnnnnnnnnnnnnnnnnnnnnnnnnnnnnnnnnnnnnnnnnnnnnnnnnnnnnnnnnnnnnnnnnnnnnnnnnnnnnnnnnnnnnnnnnnnnnnnnnnnnnnnnnnnnnnnnnnnnnnnnnnnnnnnnnnnnnnnnnnnnnnnnnnnnnnnnnnnnnnnnnnnnnnnnnnnnnnnnnnnnnnnnnnnnnnnnnnnnnnnnnnnnnnnnnnnnnnnnnnnnnnnnnnnnnnnnnnnnnnnnnnnnnnnnnnnnnnnnnnnnnnnnnnnnnnnnnnnnnnnnnnnnnnnnnnnnnnnnnnnnnnnnnnnnnnnnnnnnnnnnnnnnnnnnnnnnnnnnnnnnnnnnnnnnnnnnnnnnnnnnnnnnnnnnnnnnnnnnnnnnnnnnnnnnnnnnnnnnnnnnnnnnnnnnnnnnnnnnnnnnnnnnnnnnnnnnnnnnnnnnnnnnnnnnnnnnnnnnnnnnnnnnnnnnnnnnnnnnnnnnnnnnnnnnnnnnnnnnnnnnnnnnnnnnnnnnnnnnnnnnnnnnnnnnnnnnnnnnnnnnnnnnnnnnnnnnnnnnnnnnnnnnnnnnnnnnnnnnnnnnnnnnnnnnnnnnnnnnnnnnnnnnnnnnnnnnnnnnnnnnnnnnnnnnnnnnnnnnnnnnnnnnnnnnnnnnnnnnnnnnnnnnnnnnnnnnnnnnnnnnnnnnnnnnnnnnnnnnnnnnnnnnnnnnnnnnnnnnnnnnnnnnnnnnnnnnnnnnnnnnnnnnnnnnnnnnnnnnnnnnnnnnnnnnnnnnnnnnnnnnnnnnnnnnnnnnnnnnnnnnnnnnnnnnnnnnnnnnnnnnnnnnnnnnnnnnnnnnnnnnnnnnnnnnnnnnnnnnnnnnnnnnnnnnnnnnnnnnnnnnnnnnnnnnnnnnnnnnnnnnnnnnnnnnnnnnnnnnnnnnnnnnnnnnnnnnnnnnnnnnnnnnnnnnnnnnnnnnnnnnnnnnnnnnnnnnnnnnnnnnnnnnnnnnnnnnnnnnnnnnnnnnnnnnnnnnnnnnnnnnnnnnnnnnnnnnnnnnnnnnnnnnnnnnnnnnnnnnnnnnnnnnnnnnnnnnnnnnnnnnnnnnnnnnnnnnnnnnnnnnnnnnnnnnnnnnnnnnnnnnnnnnnnnnnnnnnnnnnnnnnnnnnnnnnnnnnnnnnnnnnnnnnnnnnnnnnnnnnnnnnnnnnnnnnnnnnnnnnnnnnnnnnnnnnnnnnnnnnnnnnnnnnnnnnnnnnnnnnnnnnnnnnnnnnnnnnnnnnnnnnnnnnnnnnnnnnnnnnnnnnnnnnnnnnnnnnnnnnnnnnnnnnnnnnnnnnnnnnnnnnnnnnnnnnnnnnnnnnnnnnnnnnnnnnnnnnnnnnnnnnnnnnnnnnnnnnnnnnnnnnnnnnnnnnnnnnnnnnnnnnnnnnnnnnnnnnnnnnnnnnnnnnnnnnnnnnnnnnnnnnnnnnnnnnnnnnnnnnnnnnnnnnnnnnnnnnnnnnnnnnnnnnnnnnnnnnnnnnnnnnnnnnnnnnnnnnnnnnnnnnnnnnnnnnnnnnnnnnnnnnnnnnnnnnnnnnnnnnnnnnnnnnnnnnnnnnnnnnnnnnnnnnnnnnnnnnnnnnnnnnnnnnnnnnnnnnnnnnnnnnnnnnnnnnnnnnnnnnnnnnnnnnnnnnnnnnnnnnnnnnnnnnnnnnnnnnnnnnnnnnnnnnnnnnnnnnnnnnnnnnnnnnnnnnnnnnnnnnnnnnnnnnnnnnnnnnnnnnnnnnnnnnnnnnnnnnnnnnnnnnnnnnnnnnnnnnnnnnnnnnnnnnnnnnnnnnnnnnnnnnnnnnnnnnnnnnnnnnnnnnnnnnnnnnnnnnnnnnnnnnnnnnnnnnnnnnnnnnnnnnnnnnnnnnnnnnnnnnnnnnnnnnnnnnnnnnnnnnnnnnnnnnnnnnnnnnnnnnnnnnnnnnnnnnnnnnnnnnnnnnnnnnnnnnnnnnnnnnnnnnnnnnnnnnnnnnnnnnnnnnnnnnnnnnnnnnnnnnnnnnnnnnnnnnnnnnnnnnnnnnnnnnnnnnnnnnnnnnnnnnnnnnnnnnnnnnnnnnnnnnnnnnnnnnnnnnnnnnnnnnnnnnnnnnnnnnnnnnnnnnnnnnnnnnnnnnnnnnnnnnnnnnnnnnnnnnnnnnnnnnnnnnnnnnnnnnnnnnnnnnnnnnnnnnnnnnnnnnnnnnnnnnnnnnnnnnnnnnnnnnnnnnnnnnnnnnnnnnnnnnnnnnnnnnnnnnnnnnnnnnnnnnnnnnnnnnnnnnnnnnnnnnnnnnnnnnnnnnnnnnnnnnnnnnnnnnnnnnnnnnnnnnnnnnnnnnnnnnnnnnnnnnnnnnnnnnnnnnnnnnnnnnnnnnnnnnnnnnnnnnnnnnnnnnnnnnnnnnnnnnnnnnnnnnnnnnnnnnnnnnnnnnnnnnnnnnnnnnnnnnnnnnnnnnnnnnnnnnnnnnnnnnnnnnnnnnnnnnnnnnnnnnnnnnnnnnnnnnnnnnnnnnnnnnnnnnnnnnnnnnnnnnnnnnnnnnnnnnnnnnnnnnnnnnnnnnnnnnnnnnnnnnnnnnnnnnnnnnnnnnnnnnnnnnnnnnnnnnnnnnnnnnnnnnnnnnnnnnnnnnnnnnnnnnnnnnnnnnnnnnnnnnnnnnnnnnnnnnnnnnnnnnnnnnnnnnnnnnnnnnnnnnnnnnnnnnnnnnnnnnnnnnnnnnnnnnnnnnnnnnnnnnnnnnnnnnnnnnnnnnnnnnnnnnnnnnnnnnnnnnnnnnnnnnnnnnnnnnnnnnnnnnnnnnnnnnnnnnnnnnnnnnnnnnnnnnnnnnnnnnnnnnnnnnnnnnnnnnnnnnnnnnnnnnnnnnnnnnnnnnnnnnnnnnnnnnnnnnnnnnnnnnnnnnnnnnnnnnnnnnnnnnnnnnnnnnnnnnnnnnnnnnnnnnnnnnnnnnnnnnnnnnnnnnnnnnnnnnnnnnnnnnnnnnnnnnnnnnnnnnnnnnnnnnnnnnnnnnnnnnnnnnnnnnnnnnnnnnnnnnnnnnnnnnnnnnnnnnnnnnnnnnnnnnnnnnnnnnnnnnnnnnnnnnnnnnnnnnnnnnnnnnnnnnnnnnnnnnnnnnnnnnnnnnnnnnnnnnnnnnnnnnnnnnnnnnnnnnnnnnnnnnnnnnnnnnnnnnnnnnnnnnnnnnnnnnnnnnnnnnnnnnnnnnnnnnnnnnnnnnnnnnnnnnnnnnnnnnnnnnnnnnnnnnnnnnnnnnnnnnnnnnnnnnnnnnnnnnnnnnnnnnnnnnnnnnnnnnnnnnnnnnnnnnnnnnnnnnnnnnnnnnnnnnnnnnnnnnnnnnnnnnnnnnnnnnnnnnnnnnnnnnnnnnnnnnnnnnnnnnnnnnnnnnnnnnnnnnnnnnnnnnnnnnnnnnnnnnnnnnnnnnnnnnnnnnnnnnnnnnnnnnnnnnnnnnnnnnnnnnnnnnnnnnnnnnnnnnnnnnnnnnnnnnnnnnnnnnnnnnnnnnnnnnnnnnnnnnnnnnnnnnnnnnnnnnnnnnnnnnnnnnnnnnnnnnnnnnnnnnnnnnnnnnnnnnnnnnnnnnnnnnnnnnnnnnnnnnnnnnnnnnnnnnnnnnnnnnnnnnnnnnnnnnnnnnnnnnnnnnnnnnnnnnnnnnnnnnnnnnnnnnnnnnnnnnnnnnnnnnnnnnnnnnnnnnnnnnnnnnnnnnnnnnnnnnnnnnnnnnnnnnnnnnnnnnnnnnnnnnnnnnnnnnnnnnnnnnnnnnnnnnnnnnnnnnnnnnnnnnnnnnnnnnnnnnnnnnnnnnnnnnnnnnnnnnnnnnnnnnnnnnnnnnnnnnnnnnnnnnnnnnnnnnnnnnnnnnnnnnnnnnnnnnnnnnnnnnnnnnnnnnnnnnnnnnnnnnnnnnnnnnnnnnnnnnnnnnnnnnnnnnnnnnnnnnnnnnnnnnnnnnnnnnnnnnnnnnnnnnnnnnnnnnnnnnnnnnnnnnnnnnnnnnnnnnnnnnnnnnnnnnnnnnnnnnnnnnnnnnnnnnnnnnnnnnnnnnnnnnnnnnnnnnnnnnnnnnnnnnnnnnnnnnnnnnnnnnnnnnnnnnnnnnnnnnnnnnnnnnnnnnnnnnnnnnnnnnnnnnnnnnnnnnnnnnnnnnnnnnnnnnnnnnnnnnnnnnnnnnnnnnnnnnnnnnnnnnnnnnnnnnnnnnnnnnnnnnnnnnnnnnnnnnnnnnnnnnnnnnnnnnnnnnnnnnnnnnnnnnnnnnnnnnnnnnnnnnnnnnnnnnnnnnnnnnnnnnnnnnnnnnnnnnnnnnnnnnnnnnnnnnnnnnnnnnnnnnnnnnnnnnnnnnnnnnnnnnnnnnnnnnnnnnnnnnnnnnnnnnnnnnnnnnnnnnnnnnnnnnnnnnnnnnnnnnnnnnnnnnnnnnnnnnnnnnnnnnnnnnnnnnnnnnnnnnnnnnnnnnnnnnnnnnnnnnnnnnnnnnnnnnnnnnnnnnnnnnnnnnnnnnnnnnnnnnnnnnnnnnnnnnnnnnnnnnnnnnnnnnnnnnnnnnnnnnnnnnnnnnnnnnnnnnnnnnnnnnnnnnnnnnnnnnnnnnnnnnnnnnnnnnnnnnnnnnnnnnnnnnnnnnnnnnnnnnnnnnnnnnnnnnnnnnnnnnnnnnnnnnnnnnnnnnnnnnnnnnnnnnnnnnnnnnnnnnnnnnnnnnnnnnnnnnnnnnnnnnnnnnnnnnnnnnnnnnnnnnnnnnnnnnnnnnnnnnnnnnnnnnnnnnnnnnnnnnnnnnnnnnnnnnnnnnnnnnnnnnnnnnnnnnnnnnnnnnnnnnnnnnnnnnnnnnnnnnnnnnnnnnnnnnnnnnnnnnnnnnnnnnnnnnnnnnnnnnnnnnnnnnnnnnnnnnnnnnnnnnnnnnnnnnnnnnnnnnnnnnnnnnnnnnnnnnnnnnnnnnnnnnnnnnnnnnnnnnnnnnnnnnnnnnnnnnnnnnnnnnnnnnnnnnnnnnnnnnnnnnnnnnnnnnnnnnnnnnnnnnnnnnnnnnnnnnnnnnnnnnnnnnnnnnnnnnnnnnnnnnnnnnnnnnnnnnnnnnnnnnnnnnnnnnnnnnnnnnnnnnnnnnnnnnnnnnnnnnnnnnnnnnnnnnnnnnnnnnnnnnnnnnnnnnnnnnnnnnnnnnnnnnnnnnnnnnnnnnnnnnnnnnnnnnnnnnnnnnnnnnnnnnnnnnnnnnnnnnnnnnnnnnnnnnnnnnnnnnnnnnnnnnnnnnnnnnnnnnnnnnnnnnnnnnnnnnnnnnnnnnnnnnnnnnnnnnnnnnnnnnnnnnnnnnnnnnnnnnnnnnnnnnnnnnnnnnnnnnnnnnnnnnnnnnnnnnnnnnnnnnnnnnnnnnnnnnnnnnnnnnnnnnnnnnnnnnnnnnnnnnnnnnnnnnnnnnnnnnnnnnnnnnnnnnnnnnnnnnnnnnnnnnnnnnnnnnnnnnnnnnnnnnnnnnnnnnnnnnnnnnnnnnnnnnnnnnnnnnnnnnnnnnnnnnnnnnnnnnnnnnnnnnnnnnnnnnnnnnnnnnnnnnnnnnnnnnnnnnnnnnnnnnnnnnnnnnnnnnnnnnnnnnnnnnnnnnnnnnnnnnnnnnnnnnnnnnnnnnnnnnnnnnnnnnnnnnnnnnnnnnnnnnnnnnnnnnnnnnnnnnnnnnnnnnnnnnnnnnnnnnnnnnnnnnnnnnnnnnnnnnnnnnnnnnnnnnnnnnnnnnnnnnnnnnnnnnnnnnnnnnnnnnnnnnnnnnnnnnnnnnnnnnnnnnnnnnnnnnnnnnnnnnnnnnnnnnnnnnnnnnnnnnnnnnnnnnnnnnnnnnnnnnnnnnnnnnnnnnnnnnnnnnnnnnnnnnnnnnnnnnnnnnnnnnnnnnnnnnnnnnnnnnnnnnnnnnnnnnnnnnnnnnnnnnnnnnnnnnnnnnnnnnnnnnnnnnnnnnnnnnnnnnnnnnnnnnnnnnnnnnnnnnnnnnnnnnnnnnnnnnnnnnnnnnnnnnnnnnnnnnnnnnnnnnnnnnnnnnnnnnnnnnnnnnnnnnnnnnnnnnnnnnnnnnnnnnnnnnnnnnnnnnnnnnnnnnnnnnnnnnnnnnnnnnnnnnnnnnnnnnnnnnnnnnnnnnnnnnnnnnnnnnnnnnnnnnnnnnnnnnnnnnnnnnnnnnnnnnnnnnnnnnnnnnnnnnnnnnnnnnnnnnnnnnnnnnnnnnnnnnnnnnnnnnnnnnnnnnnnnnnnnnnnnnnnnnnnnnnnnnnnnnnnnnnnnnnnnnnnnnnnnnnnnnnnnnnnnnnnnnnnnnnnnnnnnnnnnnnnnnnnnnnnnnnnnnnnnnnnnnnnnnnnnnnnnnnnnnnnnnnnnnnnnnnnnnnnnnnnnnnnnnnnnnnnnnnnnnnnnnnnnnnnnnnnnnnnnnnnnnnnnnnnnnnnnnnnnnnnnnnnnnnnnnnnnnnnnnnnnnnnnnnnnnnnnnnnnnnnnnnnnnnnnnnnnnnnnnnnnnnnnnnnnnnnnnnnnnnnnnnnnnnnnnnnnnnnnnnnnnnnnnnnnnnnnnnnnnnnnnnnnnnnnnnnnnnnnnnnnnnnnnnnnnnnnnnnnnnnnnnnnnnnnnnnnnnnnnnnnnnnnnnnnnnnnnnnnnnnnnnnnnnnnnnnnnnnnnnnnnnnnnnnnnnnnnnnnnnnnnnnnnnnnnnnnnnnnnnnnnnnnnnnnnnnnnnnnnnnnnnnnnnnnnnnnnnnnnnnnnnnnnnnnnnnnnnnnnnnnnnnnnnnnnnnnnnnnnnnnnnnnnnnnnnnnnnnnnnnnnnnnnnnnnnnnnnnnnnnnnnnnnnnnnnnnnnnnnnnnnnnnnnnnnnnnnnnnnnnnnnnnnnnnnnnnnnnnnnnnnnnnnnnnnnnnnnnnnnnnnnnnnnnnnnnnnnnnnnnnnnnnnnnnnnnnnnnnnnnnnnnnnnnnnnnnnnnnnnnnnnnnnnnnnnnnnnnnnnnnnnnnnnnnnnnnnnnnnnnnnnnnnnnnnnnnnnnnnnnnnnnnnnnnnnnnnnnnnnnnnnnnnnnnnnnnnnnnnnnnnnnnnnnnnnnnnnnnnnnnnnnnnnnnnnnnnnnnnnnnnnnnnnnnnnnnnnnnnnnnnnnnnnnnnnnnnnnnnnnnnnnnnnnnnnnnnnnnnnnnnnnnnnnnnnnnnnnnnnnnnnnnnnnnnnnnnnnnnnnnnnnnnnnnnnnnnnnnnnnnnnnnnnnnnnnnnnnnnnnnnnnnnnnnnnnnnnnnnnnnnnnnnnnnnnnnnnnnnnnnnnnnnnnnnnnnnnnnnnnnnnnnnnnnnnnnnnnnnnnnnnnnnnnnnnnnnnnnnnnnnnnnnnnnnnnnnnnnnnnnnnnnnnnnnnnnnnnnnnnnnnnnnnnnnnnnnnnnnnnnnnnnnnnnnnnnnnnnnnnnnnnnnnnnnnnnnnnnnnnnnnnnnnnnnnnnnnnnnnnnnnnnnnnnnnnnnnnnnnnnnnnnnnnnnnnnnnnnnnnnnnnnnnnnnnnnnnnnnnnnnnnnnnnnnnnnnnnnnnnnnnnnnnnnnnnnnnnnnnnnnnnnnnnnnnnnnnnnnnnnnnnnnnnnnnnnnnnnnnnnnnnnnnnnnnnnnnnnnnnnnnnnnnnnnnnnnnnnnnnnnnnnnnnnnnnnnnnnnnnnnnnnnnnnnnnnnnnnnnnnnnnnnnnnnnnnnnnnnnnnnnnnnnnnnnnnnnnnnnnnnnnnnnnnnnnnnnnnnnnnnnnnnnnnnnnnnnnnnnnnnnnnnnnnnnnnnnnnnnnnnnnnnnnnnnnnnnnnnnnnnnnnnnnnnnnnnnnnnnnnnnnnnnnnnnnnnnnnnnnnnnnnnnnnnnnnnnnnnnnnnnnnnnnnnnnnnnnnnnnnnnnnnnnnnnnnnnnnnnnnnnnnnnnnnnnnnnnnnnnnnnnnnnnnnnnnnnnnnnnnnnnnnnnnnnnnnnnnnnnnnnnnnnnnnnnnnnnnnnnnnnnnnnnnnnnnnnnnnnnnnnnnnnnnnnnnnnnnnnnnnnnnnnnnnnnnnnnnnnnnnnnnnnnnnnnnnnnnnnnnnnnnnnnnnnnnnnnnnnnnnnnnnnnnnnnnnnnnnnnnnnnnnnnnnnnnnnnnnnnnnnnnnnnnnnnnnnnnnnnnnnnnnnnnnnnnnnnnnnnnnnnnnnnnnnnnnnnnnnnnnnnnnnnnnnnnnnnnnnnnnnnnnnnnnnnnnnnnnnnnnnnnnnnnnnnnnnnnnnnnnnnnnnnnnnnnnnnnnnnnnnnnnnnnnnnnnnnnnnnnnnnnnnnnnnnnnnnnnnnnnnnnnnnnnnnnnnnnnnnnnnnnnnnnnnnnnnnnnnnnnnnnnnnnnnnnnnnnnnnnnnnnnnnnnnnnnnnnnnnnnnnnnnnnnnnnnnnnnnnnnnnnnnnnnnnnnnnnnnnnnnnnnnnnnnnnnnnnnnnnnnnnnnnnnnnnnnnnnnnnnnnnnnnnnnnnnnnnnnnnnnnnnnnnnnnnnnnnnnnnnnnnnnnnnnnnnnnnnnnnnnnnnnnnnnnnnnnnnnnnnnnnnnnnnnnnnnnnnnnnnnnnnnnnnnnnnnnnnnnnnnnnnnnnnnnnnnnnnnnnnnnnnnnnnnnnnnnnnnnnnnnccgtagtcgtagttgtagctggcgtcgtcgttcctccactgggcattgttggccccgcgtccacggccattgccattgccgccgcgtcttgggccccgattctcgtccttctgcttggtccagcacttgtcaatcgtgtgccccaatttcccgcagtacgtacactggcgagactctcggtcggtgttgaacgccttggccgcattctccgtcttcaccgtcgccgtcttctcgccttgtctcttgatgtgctcattcgtcagcaccttcacgacgtcctgcgatcgtagttcagcgctgctcatctccaagttcagcacgacgttctcgtagctcttggggaggctgcgcaacaggcagatcgccacgtcctcatcctccatcttggcgccgatgctgctgagcttggcgctgatgttgaggatctcgttgcaatgatgcaagacgttgccgccttccgacatctccatgctgaagagttggcgcttcaggtagatgcgtccagccttctgcgaaccaccgtacagcgtcttcaggcgcgtccacgcaacccacgcttcctcgcagtcgtcgaccacatggtggtagtccgcgtccatgtggagcaacatcagtccgaacgcgatgttgctcgacttgacgtagtcgtccttggcccgcgagtccgtgaagctcggcgtcgtctcgcggttcacgacatgccacgtcgacttggtcaggaacacgccacgcatgtagcggttccacgtcgcgtagttgtcaccgttgaacttgtcaatggagaccttggtcgaggcgtcttgggcagaggacatggtgcttgggctcataacctgatggaaggtatggatcttggacacgaagatcggacgaagcggagggagggacgtcgcagacggcgggaccggagcgaaggcacttgaggggtagaatgaagattcgaaagtgattgaactgttggagcttacaccctactgttatagacacgcgaccctgcgtcctatcacctagtgcatctaatcaaccatcactcactggtgttcatccaatcatcctactcgtctaatcatcggtggcgtaaacaacttaccgtaatcaccataatcaacgtgggttcggattggaccggttcgggttaaccggttaatgggtataactggtacacagtacccaagaccagcaaccctcaatagttgaggacctcgttgcaatgatgcaagacgttgccgccttccgacatctccatgctgaagagttggcgcttcaggtagatgcgtccagccttctgcgaaccaccgtacagcgtcttcaggcgcgtccacgcaacccacgcttcctcgcag
